(19) United States
(12) Patent Application Publication
(10) Pub. No.: US 2025/0305053 A1
(43) Pub. Date: Oct. 2, 2025

(54) NEW NRG1 FUSIONS, FUSION JUNCTIONS AND METHODS FOR DETECTING THEM

(71) Applicant: MERUS N.V., Utrecht (NL)

(72) Inventors: Ernesto Isaac WASSERMAN, Utrecht (NL); Jeroen Jilles LAMMERTS VAN BUEREN, Utrecht (NL)

(21) Appl. No.: 18/566,982

(22) PCT Filed: Jun. 1, 2022
(86) PCT No.: PCT/NL2022/050302

§ 371 Date: Dec. 4, 2023

(30) Foreign Application Priority Data
Jun. 3, 2021 (NL) 2028384
Dec. 3, 2021 (NL) 2030006

(51) Int. Cl. C12Q 1/6886

(52) U.S. Cl. CPC C12Q 1/6886; C12Q 2600/156

(57) ABSTRACT

The disclosure relates to the field of neuregulin-1 (NRG1) fusions, methods for detecting such, identifying or diagnosing patients with such fusions and methods of treatment of a cancer, a tumor or an aberrant cell comprising an NRG1 fusion. Also, it relates to the field of therapeutic (human) compounds for the treatment of subjects with an ErbB-2/ErbB-3 positive cancer that comprise a NRG1 fusion.

### CROSS REFERENCE TO RELATED APPLICATIONS

[0001] This application is a 35 U.S.C. § 371 National Phase Application of PCT/NL2022/050302 filed Jun. 1, 2022, the content of which is hereby incorporated by reference.

### REFERENCE TO A SEQUENCE LISTING

[0002] This application includes a Sequence Listing submitted electronically via EFS-Web (Name: 4096_0550002_Seqlisting_ST25.txt, File Size: 1,046,300 bytes, and Creation Date: Nov. 21, 2024), which is hereby incorporated by reference in its entirety.

### FIELD OF THE INVENTION

[0003] The disclosure relates to the field of neuregulin-1 (NRG1) fusions, methods for detecting such, identifying or diagnosing patients with such fusions and methods of treatment of a cancer, a tumor or an aberrant cell comprising an NRG1 fusion. Also, it relates to the field of therapeutic (human) compounds for the treatment of subjects with an ErbB-2/ErbB-3 positive cancer that comprise a NRG1 fusion.

### BACKGROUND OF THE INVENTION

[0004] Proteolytic processing of the extra cellular domain of transmembrane NRG1 isoforms release soluble factors. HRG1-ß1 is one of the proteins encoded by the NRG1 gene. NRG1 contains an Ig domain and an EGF-like domain that is necessary for direct binding to receptor tyrosine kinases ErbB-3 and ErbB-4. The NRG1 gene and the isoforms are known under a number of different aliases such as: Neuregulin 1; Pro-NRG1; HRGA; SMDF; HGL; GGF; NDF; NRG1 Intronic Transcript 2 (Non-Protein Coding); Heregulin, Alpha (45 kD, ERBB2 P185-Activator); Acetylcholine Receptor-Inducing Activity; Pro-Neuregulin-1, Membrane-Bound Isoform; Sensory And Motor Neuron Derived Factor; Neu Differentiation Factor; Glial Growth Factor 2; NRG1-IT2; MSTP131; MST131; ARIA; GGF2; HRG1; and HRG. External Ids for NRG1 Gene are HGNC: 7997; Entrez Gene: 3084; Ensembl: ENSG00000157168; OMIM: 142445 and UniProtKB: Q02297.

[0005] Isoforms of NRG1 are made by alternative splicing, and include forms that are transmembrane, externally membrane bound, shed, secreted or intracellular (Falls in Exp Cell Res 284: 14-30, 2003; Hayes and Gullick in J. Mammary Gland Biol Neoplasia 13: 205-214, 2008). They bind to ErbB-3 or ErbB-4, which is understood to promote heterodimer formation with ErbB-2 (HER2). Although the NRG1-encoded proteins are usually thought of as mitogens, they can also be powerfully proapoptotic: in particular, expressing NRG1 in cells can cause apoptosis of the expressing cell (cf. Weinstein et al. in oncogene 17: 2107-2113, 1998).

[0006] Given the diverse array of tumor types that harbor NRG1 fusions, there is a need for quicker and more robust diagnosis, and a need for identification of heretofore unknown NRG1 fusions, based on new fusion partners and new break points between NRG1 and fusion partner.

### SUMMARY OF THE INVENTION

[0007] The present disclosure provides, in general terms, fusions involving NRG1 and novel fusion partners, as well as polypeptide fusions encoded therefrom. The present disclosure provides a fusion involving NRG1 and VAPB, NRG1 and PVALB, NRG1 and DAAM1, NRG1 and ASPH, NRG1 and ZFAT or NRG1 and DSCAML1 as novel fusion partners, denoted herein as VAPB-NRG1, PVALB-NRG1, DAAM1-NRG1, ASPH-NRG1, ZFAT-NRG1 and DSCAML1-NRG1, respectively as a general term. More in particular, this aspect of the present disclosure relates
[0008] to a polynucleotide comprising a VAPB nucleic acid sequence, or a portion of a VAPB nucleic acid sequence, fused with an NRG1 nucleic acid sequence, or a portion of a NRG1 nucleic acid sequence or
[0009] to a polynucleotide comprising a PVALB nucleic acid sequence, or a portion of a PVALB nucleic acid sequence, fused with an NRG1 nucleic acid sequence, or a portion of a NRG1 nucleic acid sequence or
[0010] to a polynucleotide comprising a DAAM1 nucleic acid sequence, or a portion of a DAAM1 nucleic acid sequence, fused with an NRG1 nucleic acid sequence, or a portion of a NRG1 nucleic acid sequence or
[0011] to a polynucleotide comprising a ASPH nucleic acid sequence, or a portion of a ASPH nucleic acid sequence, fused with an NRG1 nucleic acid sequence, or a portion of a NRG1 nucleic acid sequence or
[0012] to a polynucleotide comprising a ZFAT nucleic acid sequence, or a portion of a ZFAT nucleic acid sequence, fused with an NRG1 nucleic acid sequence, or a portion of a NRG1 nucleic acid sequence or
[0013] to a polynucleotide comprising a DSCAML1 nucleic acid sequence, or a portion of a DSCAML1 nucleic acid sequence, fused with an NRG1 nucleic acid sequence, or a portion of a NRG1 nucleic acid sequence.

[0014] Preferably, the VAPB nucleic acid sequence comprises or consists of (a portion of) any one the sequences SEQ ID NO: 17-23 or an allelic variant of any one of SEQ ID NOs: 17-23. Preferably, the NRG1 nucleic acid sequence comprises or consists of (a portion of) any one of the sequences SEQ ID NO: 125-138 or an allelic variant of any one of sequences SEQ ID NO: 125-138.

[0015] Alternatively or additionally, the present disclosure provides a polynucleotide comprising a portion of exon 1 of VAPB, or of an allelic variant of exon 1, fused with a portion of exon 2 of NRG1, or of an allelic variant of exon 2. Preferably, exon 1 of VAPB comprises or consists of SEQ ID NO: 17 and the allelic variant preferably is a variant of SEQ ID NO: 17. Exon 2 of NRG1 preferably comprises or consists of SEQ ID NO: 126 and the allelic variant preferably is a variant of SEQ ID NO: 126.

[0016] Preferably, the PVALB nucleic acid sequence comprises or consists of (a portion of) any one the sequences SEQ ID NO: 439-444 or an allelic variant of any one of SEQ ID NOs: 439-444. Preferably, the NRG1 nucleic acid sequence comprises or consists of (a portion of) any one of the sequences SEQ ID NO: 125-138 or an allelic variant of any one of sequences SEQ ID NO: 125-138.

[0017] Alternatively or additionally, the present disclosure provides a polynucleotide comprising a portion of exon 4 of PVALB, or of an allelic variant of exon 4, fused with a portion of exon 6 of NRG1, or of an allelic variant of exon 6. Preferably, exon 4 of PVALB comprises or consists of SEQ ID NO: 442 and the allelic variant preferably is a variant of SEQ ID NO: 442. Exon 6 of NRG1 preferably comprises or consists of SEQ ID NO: 130 and the allelic variant preferably is a variant of SEQ ID NO: 130.

[0018] Preferably, the DAAM1 nucleic acid sequence comprises or consists of (a portion of) any one the sequences SEQ ID NO: 606-631 or an allelic variant of any one of SEQ ID NOs: 606-631. Preferably, the NRG1 nucleic acid sequence comprises or consists of (a portion of) any one of the sequences SEQ ID NO: 125-138 or an allelic variant of any one of sequences SEQ ID NO: 125-138.

[0019] Alternatively or additionally, the present disclosure provides a polynucleotide comprising a portion of exon 1 of DAAM1, or of an allelic variant of exon 1, fused with a portion of exon 1 of NRG1, or of an allelic variant of exon 1. Preferably, exon 1 of DAAM1 comprises or consists of SEQ ID NO: 606 and the allelic variant preferably is a variant of SEQ ID NO: 606. Exon 1 of NRG1 preferably comprises or consists of SEQ ID NO: 125 and the allelic variant preferably is a variant of SEQ ID NO: 125.

[0020] Preferably, the ASPH nucleic acid sequence comprises or consists of (a portion of) any one the sequences SEQ ID NO: 637-662 or an allelic variant of any one of SEQ ID NOs: 637-662. Preferably, the NRG1 nucleic acid sequence comprises or consists of (a portion of) any one of the sequences SEQ ID NO: 125-138 or an allelic variant of any one of sequences SEQ ID NO: 125-138.

[0021] Alternatively or additionally, the present disclosure provides a polynucleotide comprising a portion of exon 22 of ASPH, or of an allelic variant of exon 22, fused with a portion of exon 2 of NRG1, or of an allelic variant of exon 2. Preferably, exon 22 of ASPH comprises or consists of SEQ ID NO: 658 and the allelic variant preferably is a variant of SEQ ID NO: 658. Exon 2 of NRG1 preferably comprises or consists of SEQ ID NO: 126 and the allelic variant preferably is a variant of SEQ ID NO: 126.

[0022] Preferably, the ZFAT nucleic acid sequence comprises or consists of (a portion of) any one the sequences SEQ ID NO: 830-846 or an allelic variant of any one of SEQ ID NOs: 830-846. Preferably, the NRG1 nucleic acid sequence comprises or consists of (a portion of) any one of the sequences SEQ ID NO: 125-138 or an allelic variant of any one of sequences SEQ ID NO: 125-138.

[0023] Alternatively or additionally, the present disclosure provides a polynucleotide comprising a portion of exon 12 of ZFAT, or of an allelic variant of exon 12, fused with a portion of exon 6 of NRG1, or of an allelic variant of exon 6. Preferably, exon 12 of ZFAT comprises or consists of SEQ ID NO: 841 and the allelic variant preferably is a variant of SEQ ID NO: 841. Exon 6 of NRG1 preferably comprises or consists of SEQ ID NO: 130 and the allelic variant preferably is a variant of SEQ ID NO: 130.

[0024] Preferably, the DSCAML1 nucleic acid sequence comprises or consists of (a portion of) any one the sequences SEQ ID NO: 870-903 or an allelic variant of any one of SEQ ID NOs: 870-903. Preferably, the NRG1 nucleic acid sequence comprises or consists of (a portion of) any one of the sequences SEQ ID NO: 125-138 or an allelic variant of any one of sequences SEQ ID NO: 125-138.

[0025] Alternatively or additionally, the present disclosure provides a polynucleotide comprising a portion of exon 3 of DSCAML1, or of an allelic variant of exon 3, fused with a portion of exon 2 of NRG1, or of an allelic variant of exon 2. Preferably, exon 3 of DSCAML1 comprises or consists of SEQ ID NO: 872 and the allelic variant preferably is a variant of SEQ ID NO: 872. Exon 2 of NRG1 preferably comprises or consists of SEQ ID NO: 126 and the allelic variant preferably is a variant of SEQ ID NO: 126.

[0026] Additionally, the present disclosure provides fusions involving NRG1 with previously undisclosed fusion junctions, as well as polypeptide fusions encoded therefrom. In particular, the present disclosure additionally provides fusions involving NRG1 and CADM1, denoted herein as CADM1-NRG1 as a general term, the present disclosure also provides a fusion involving NRG1 and CD44, denoted herein as CD44-NRG1 as a general term, the present disclosure provides a fusion involving NRG1 and SLC3A2, denoted herein as SLC3A2-NRG1 as a general term, the present disclosure provides a fusion involving NRG1 and VTCN1, denoted herein as VTCN1-NRG1 as a general term, the present disclosure provides a fusion involving NRG1 and CDH1, denoted herein as CDH1-NRG1 as a general term, the present disclosure provides a fusion involving NRG1 and CXADR, denoted herein as CXADR-NRG1 as a general term, the present disclosure provides a fusion involving NRG1 and GTF2E2, denoted herein as GTF2E2-NRG1 as a general term, the present disclosure provides a fusion involving NRG1 and CSMD1, denoted herein as CSMD1-NRG1 as a general term, the present disclosure provides a fusion involving NRG1 and PTN, denoted herein as PTN-NRG1 as a general term, the present disclosure provides a fusion involving NRG1 and ST14, denoted herein as ST14-NRG1 as a general term, the present disclosure provides a fusion involving NRG1 and THBS1, denoted herein as THBS1-NRG1 as a general term and the present disclosure provides a fusion involving NRG1 and AGRN, denoted herein as AGRN-NRG1 as a general term, the present disclosure also provides a fusion involving NRG1 and APP, denoted herein as APP-NRG1 as a general term, the present disclosure also provides a fusion involving NRG1 and WRN, denoted herein as WRN-NRG1 as a general term, the present disclosure also provides a fusion involving NRG1 and NOTCH2, denoted herein as NOTCH2-NRG1 as a general term, the present disclosure also provides a fusion involving NRG1 and CD74, denoted herein as CD74-NRG1 as a general term, the present disclosure also provides a fusion involving NRG1 and SDC4, denoted herein as SDC4-NRG1 as a general term, the present disclosure also provides a fusion involving NRG1 and SLC4A4, denoted herein as SLC4A4-NRG1 as a general term.

[0027] The present disclosure provides the following novel fusion junctions. In particular, the present disclosure provides a polynucleotide comprising a portion of exon 7 of CADM1, or an allelic variant of exon 7, fused with a portion of exon 6 of NRG1, or an allelic variant of exon 6. Preferably, exon 7 of CADM1 comprises or consists of SEQ ID NO: 39 and the allelic variant preferably is a variant of SEQ ID NO: 39. Exon 6 of NRG1 preferably comprises or consists of SEQ ID NO: 130 and the allelic variant preferably is a variant of SEQ ID NO: 130.

[0028] In particular, the present disclosure provides a polynucleotide comprising a portion of exon 5 of CD44, or an allelic variant of exon 5, fused with a portion of exon 2 of NRG1, or an allelic variant of exon 2. Preferably, exon 5 of CD44 comprises or consists of SEQ ID NO: 65 and the allelic variant preferably is a variant of SEQ ID NO: 65. Exon 2 of NRG1 preferably comprises or consists of SEQ ID NO: 126 and the allelic variant preferably is a variant of SEQ ID NO: 126.

[0029] In particular, the present disclosure provides a polynucleotide comprising a portion of exon 5 of CD44, or an allelic variant of exon 5, fused with a portion of exon 6 of NRG1, or an allelic variant of exon 6. Preferably, exon 5 of CD44 comprises or consists of SEQ ID NO: 65 and the allelic variant preferably is a variant of SEQ ID NO: 65. Exon 6 of NRG1 preferably comprises or consists of SEQ ID NO: 130 and the allelic variant preferably is a variant of SEQ ID NO: 130.

[0030] In particular, the present disclosure provides a polynucleotide comprising a portion of exon 1 of transcript version 6 of SLC3A2, or an allelic variant of exon 1 of transcript version 6, fused with a portion of exon 5 of NRG1, or an allelic variant of exon 2. Preferably, said exon of SLC3A2 comprises or consists of SEQ ID NO: 103 and the allelic variant preferably is a variant of SEQ ID NO: 103. Exon 5 of NRG1 preferably comprises or consists of SEQ ID NO: 129 and the allelic variant preferably is a variant of SEQ ID NO: 129.

[0031] In particular, the present disclosure provides a polynucleotide comprising a portion of exon 2 of VTCN1, or an allelic variant of exon 2, fused with a portion of exon 2 of NRG1, or an allelic variant of exon 2. Preferably, exon 2 of VTCN1 comprises or consists of SEQ ID NO: 169 and the allelic variant preferably is a variant of SEQ ID NO: 169. Exon 2 of NRG1 preferably comprises or consists of SEQ ID NO: 126 and the allelic variant preferably is a 35 variant of SEQ ID NO: 126.

[0032] In particular, the present disclosure provides a polynucleotide comprising a portion of exon 11 of CDH1, or an allelic variant of exon 11, fused with a portion of exon 2 of NRG1, or an allelic variant of exon 2. Preferably, exon 11 of CDH1 comprises or consists of SEQ ID NO: 198 and the allelic variant preferably is a variant of SEQ ID NO: 198. Exon 2 of NRG1 preferably comprises or consists of SEQ ID NO: 126 and the allelic variant preferably is a variant of SEQ ID NO: 126.

[0033] In particular, the present disclosure provides a polynucleotide comprising a portion of exon 1 of CXADR, or an allelic variant of exon 1, fused with a portion of exon 2 of NRG1, or an allelic variant of exon 2. Preferably, exon 1 of CXADR comprises or consists of SEQ ID NO: 219 and the allelic variant preferably is a variant of SEQ ID NO: 219. Exon 2 of NRG1 preferably comprises or consists of SEQ ID NO: 126 and the allelic variant preferably is a variant of SEQ ID NO: 126.

[0034] In particular, the present disclosure provides a polynucleotide comprising a portion of exon 2 of GTF2E2, or an allelic variant of exon 2, fused with a portion of exon 2 of NRG1, or an allelic variant of exon 2. Preferably, exon 2 of GTF2E2 comprises or consists of SEQ ID NO: 236 and the allelic variant preferably is a variant of SEQ ID NO: 236. Exon 2 of NRG1 preferably comprises or consists of SEQ ID NO: 126 and the allelic variant preferably is a variant of SEQ ID NO: 126.

[0035] In particular, the present disclosure provides a polynucleotide comprising a portion of exon 23 of CSMD1, or an allelic variant of exon 23, fused with a portion of exon 6 of NRG1, or an allelic variant of exon 6. Preferably, exon 23 of CSMD1 comprises or consists of SEQ ID NO: 279 and the allelic variant preferably is a variant of SEQ ID NO: 279. Exon 6 of NRG1 preferably comprises or consists of SEQ ID NO: 130 and the allelic variant preferably is a variant of SEQ ID NO: 130.

[0036] In particular, the present disclosure provides a polynucleotide comprising a portion of exon 4 of PTN, or an allelic variant of exon 4, fused with a portion of exon 2 of NRG1, or an allelic variant of exon 2. Preferably, exon 4 of PTN comprises or consists of SEQ ID NO: 318 and the allelic variant preferably is a variant of SEQ ID NO: 318. Exon 2 of NRG1 preferably comprises or consists of SEQ ID NO: 126 and the allelic variant preferably is a variant of SEQ ID NO: 126.

[0037] In particular, the present disclosure provides a polynucleotide comprising a portion of exon 11 of ST14, or an allelic variant of exon 11, fused with a portion of exon 6 of NRG1, or an allelic variant of exon 6. Preferably, exon 11 of ST14 comprises or consists of SEQ ID NO: 342 and the allelic variant preferably is a variant of SEQ ID NO: 342. Exon 6 of NRG1 preferably comprises or consists of SEQ ID NO: 130 and the allelic variant preferably is a variant of SEQ ID NO: 130.

[0038] In particular, the present disclosure provides a polynucleotide comprising a portion of exon 9 of THBS1, or an allelic variant of exon 9, fused with a portion of exon 6 of NRG1, or an allelic variant of exon 6. Preferably, exon 9 of THBS1 comprises or consists of SEQ ID NO: 386 and the allelic variant preferably is a variant of SEQ ID NO: 386. Exon 6 of NRG1 preferably comprises or consists of SEQ ID NO: 130 and the allelic variant preferably is a variant of SEQ ID NO: 130.

[0039] In particular, the present disclosure provides a polynucleotide comprising a portion of exon 12 of AGRN, or an allelic variant of exon 12, fused with a portion of exon 6 of NRG1, or an allelic variant of exon 6. Preferably, exon 12 of AGRN comprises or consists of SEQ ID NO: 416 and the allelic variant preferably is a variant of SEQ ID NO: 416. Exon 6 of NRG1 preferably comprises or consists of SEQ ID NO: 130 and the allelic variant preferably is a variant of SEQ ID NO: 130.

[0040] In particular, the present disclosure provides a polynucleotide comprising a portion of exon 4 of PVALB, or an allelic variant of exon 4, fused with a portion of exon 6 of NRG1, or an allelic variant of exon 6. Preferably, exon 4 of PVALB comprises or consists of SEQ ID NO: 442 and the allelic variant preferably is a variant of SEQ ID NO: 442. Exon 6 of NRG1 preferably comprises or consists of SEQ ID NO: 130 and the allelic variant preferably is a variant of SEQ ID NO: 130.

[0041] In particular, the present disclosure provides a polynucleotide comprising a portion of exon 2 of transcript version 3 of SLC3A2, or an allelic variant of exon 2 of transcript version 3, fused with a portion of exon 6 of NRG1, or an allelic variant of exon 6. Preferably, said exon of SLC3A2 comprises or consists of SEQ ID NO: 457 and the allelic variant preferably is a variant of SEQ ID NO: 457. Exon 6 of NRG1 preferably comprises or consists of SEQ ID NO: 130 and the allelic variant preferably is a variant of SEQ ID NO: 130.

[0042] In particular, the present disclosure provides a polynucleotide comprising a portion of exon 14 of APP, or an allelic variant of exon 14, fused with a portion of exon 6 of NRG1, or an allelic variant of exon 6. Preferably, exon 14 of APP comprises or consists of SEQ ID NO: 501 and the allelic variant preferably is a variant of SEQ ID NO: 501. Exon 6 of NRG1 preferably comprises or consists of SEQ ID NO: 130 and the allelic variant preferably is a variant of SEQ ID NO: 130.

[0043] In particular, the present disclosure provides a polynucleotide comprising a portion of exon 33 of WRN, or an allelic variant of exon 33, fused with a portion of exon 6 of NRG1, or an allelic variant of exon 6. Preferably, exon 33 of WRN comprises or consists of SEQ ID NO: 562 and the allelic variant preferably is a variant of SEQ ID NO: 562. Exon 6 of NRG1 preferably comprises or consists of SEQ ID NO: 130 and the allelic variant preferably is a variant of SEQ ID NO: 130.

[0044] In particular, the present disclosure provides a polynucleotide comprising a portion of exon 6 of NOTCH2, or an allelic variant of exon 6, fused with a portion of exon 6 of NRG1, or an allelic variant of exon 6. Preferably, exon 6 of NOTCH2 comprises or consists of SEQ ID NO: 700 and the allelic variant preferably is a variant of SEQ ID NO: 700. Exon 6 of NRG1 preferably comprises or consists of SEQ ID NO: 130 and the allelic variant preferably is a variant of SEQ ID NO: 130.

[0045] In particular, the present disclosure provides a polynucleotide comprising a portion of exon 2 of CD74, or an allelic variant of exon 2, fused with a portion of exon 2 of NRG1, or an allelic variant of exon 2. Preferably, exon 2 of CD74 comprises or consists of SEQ ID NO: 720 and the allelic variant preferably is a variant of SEQ ID NO: 720. Exon 2 of NRG1 preferably comprises or consists of SEQ ID NO: 126 and the allelic variant preferably is a variant of SEQ ID NO: 126.

[0046] In particular, the present disclosure provides a polynucleotide comprising a portion of exon 2 of SDC4, or an allelic variant of exon 2, fused with a portion of exon 2 of NRG1, or an allelic variant of exon 2. Preferably, exon 2 of SDC4 comprises or consists of SEQ ID NO: 746 and the allelic variant preferably is a variant of SEQ ID NO: 746. Exon 2 of NRG1 preferably comprises or consists of SEQ ID NO: 126 and the allelic variant preferably is a variant of SEQ ID NO: 126.

[0047] In particular, the present disclosure provides a polynucleotide comprising a portion of exon 4 of SDC4, or an allelic variant of exon 4, fused with a portion of exon 2 of NRG1, or an allelic variant of exon 2. Preferably, exon 4 of SDC4 comprises or consists of SEQ ID NO: 748 and the allelic variant preferably is a variant of SEQ ID NO: 748. Exon 2 of NRG1 preferably comprises or consists of SEQ ID NO: 126 and the allelic variant preferably is a variant of SEQ ID NO: 126.

[0048] In particular, the present disclosure provides a polynucleotide comprising a portion of exon 14 of SLC4A4, or an allelic variant of exon 14, fused with a portion of exon 6 of NRG1, or an allelic variant of exon 6. Preferably, exon 14 of SLC4A4 comprises or consists of SEQ ID NO: 780 and the allelic variant preferably is a variant of SEQ ID NO: 780. Exon 6 of NRG1 preferably comprises or consists of SEQ ID NO: 130 and the allelic variant preferably is a variant of SEQ ID NO: 130.

[0049] The herein provided NRG1 fusions have all been observed in patient derived samples, in particular patients diagnosed with cancer.

[0050] The disclosed identification of these NRG1 fusions and genetic rearrangements provide new methods for determining the presence of NRG1 polynucleotide fusions or polypeptides in or from a biological sample, methods for assaying activity of NRG1 polypeptide fusions, methods for diagnosing a cancer, a tumor or an aberrant cell that express an NRG1 polypeptide fusion, and methods for treating a cancer, a tumor or an aberrant cell that express an NRG1 polypeptide fusion and/or inhibiting the progression of oncogenesis characterized by the expression of an NRG1 polynucleotide fusion or polypeptide. These and more aspects are thus also provided by the present disclosure and described in more detail below.

[0051] The present disclosure also provides polypeptide fusions encoded by any one of the polynucleotide fusions selected from VAPB-NRG1, CADM1-NRG1 CD44-NRG1, SLC3A2-NRG1, VTCN1-NRG1, CDH1-NRG1, CXADR-NRG1, GTF2E2-NRG1, CSMD1-NRG1, PTN-NRG1, ST14-NRG1, THBS1-NRG1, AGRN-NRG1, PVALB-NRG1, APP-NRG1, WRN-NRG1, ASPH-NRG1, NOTCH2-NRG1, CD74-NRG1, SDC4-NRG1, SLC4A4-NRG1, ZFAT-NRG1 and DSCAML1-NRG1. Any one of the polypeptide fusions of the present disclosure, when expressed by an aberrant cell as mentioned herein, preferably also comprises an EGF-like domain of NRG1. Any polynucleotide fusion of the present disclosure, when contained by an aberrant cell as mentioned herein, preferably comprises the NRG1 exons coding for an EGF-like domain, such as exons 6, 7 or 8 of NRG1, more preferably exons 6 and 7 of the NRG1 polynucleotide sequence.

[0052] Also provided is a vector comprising a polynucleotide fusion of the present disclosure, a recombinant host cell comprising said polynucleotide and/or said vector. Also provided is a method of making a polypeptide of the present disclosure, comprising maintaining said recombinant host cell under conditions suitable for expression of the polynucleotide, whereby the polynucleotide fusion is expressed and a polypeptide fusion is produced, followed by isolating or purifying the polypeptide. Also provided is a method for making a recombinant host cell comprising introducing said vector into a host cell.

[0053] Also provided is a nucleic acid probe, primer or primer pair for detection of a polynucleotide fusion of the present disclosure and a detection assay comprising a nucleic acid probe, primer or primer pair for detection of the presence of a polynucleotide fusion of the present disclosure. Such a nucleic acid probe, primer or primer pair of the present disclosure has a preferred length of 10-40 nucleotides.

[0054] Also provided is a first antibody, or a set of a first and a second antibody, for detection of a polypeptide encoded by a polynucleotide fusion of the present disclosure and a detection assay comprising the first antibody or the set of a first and second antibodies for detection of the presence of a polypeptide encoded by a polynucleotide fusion of the present disclosure. Preferably, the first antibody binds a polypeptide fusion selected from VAPB-NRG1, CADM1-NRG1, CD44-NRG1, SLC3A2-NRG1, VTCN1-NRG1, CDH1-NRG1, CXADR-NRG1, GTF2E2-NRG1, CSMD1-NRG1, PTN-NRG1, ST14-NRG1, THBS1-NRG1, AGRN-NRG1, PVALB-NRG1, APP-NRG1, WRN-NRG1, ASPH-NRG1, NOTCH2-NRG1, CD74-NRG1, SDC4-NRG1, SLC4A4-NRG1, ZFAT-NRG1 and DSCAML1-NRG1 and the set of first and second antibodies binds VAPB and NRG1, or CADM1 and NRG1, or CD44 and NRG1, or SLC3A2 and NRG1, or VTCN1 and NRG1 or CDH1 and NRG1, or CXADR and NRG1, or GTF2E2 and NRG1, or CSMD1 and NRG1, or PTN and NRG1, or ST14 and NRG1, or THBS1 and NRG1, or AGRN and NRG1 or PVALB and NRG1, APP and NRG1, or WRN and NRG1, or ASPH and NRG1, or NOTCH2 and NRG1, or CD74 and NRG1, or SDC4 and NRG1, or SLC4A4 and NRG1, or ZFAT and NRG1, or DSCAML1 and NRG1, respectively.

[0055] The present disclosure, including methods to identify or detect NRG1 fusions in human subjects, further encompasses methods of diagnosis, treatment selection, and therapeutic treatment with medicaments and combinations thereof for amelioration of NRG1-fusion related maladies, including solid tumors. Among others, the present disclosure provides straight forward means or assays to quickly assess whether a subject is suffering, or prone to suffering, from a cancer, a tumor, or an aberrant cell. Such NRG1 fusion information can be advantageously used as a biomarker in a diagnostic tool.

[0056] Thus, there is also provided a method for identifying in a sample any one of the polynucleotide fusions as mentioned herein, or a polypeptide encoded therefrom, said method comprising testing a sample obtained from a subject to detect the presence of the fusion in the sample.

[0057] There is also provided a method for detecting in a sample the presence of any one of the polynucleotide fusions as mentioned herein, or a polypeptide encoded therefrom, said method comprising testing a sample obtained from a subject and detecting the presence of the fusion in the sample.

[0058] There is also provided a method for establishing whether an aberrant cell, such as a cancer cell or a tumor cell, from a subject comprises any one of the polynucleotide fusions as mentioned herein, or a polypeptide encoded therefrom, said method comprising testing a cell, or the polynucleotide or polypeptide contents of said cell, obtained from the subject for the presence of the fusion in the sample.

[0059] There is also provided a method for identifying a subject as carrying any one of the polynucleotide fusions as mentioned herein, or a polypeptide encoded therefrom, said method comprising testing a sample obtained from a subject and detecting the presence of the fusion in the sample.

[0060] The testing of the sample as mentioned herein is preferably part of an in vitro analysis or such method, or an ex vivo analysis or such method.

[0061] Preferably, the subject is a mammalian or human subject and the polynucleotides or polypeptides are mammalian or human polynucleotides or polypeptides.

[0062] Preferably, any polynucleotide fusion as mentioned herein and/or the polypeptide encoded therefrom as mentioned herein, are isolated and/or purified or substantially isolated or substantially purified.

[0063] The present disclosure relates to a subject suffering from, or suspect of suffering from a cancer, in particular a solid cancer or a tumor. In particular, such a cancer is an adenocarcinoma, more in particular mucinous adenocarcinoma, a pancreatic cancer, more in particular a pancreatic adenocarcinoma, or a renal cell carcinoma, cholangiocarcinoma, a brain cancer, glioblastoma, a cholangiocarcinoma, a glioma, a pancreatic ductal adenocarcinoma, a sarcoma, a bladder cancer, a colon cancer, a rectal cancer, a colorectal cancer, a gallbladder cancer, a head and neck cancer, a prostate cancer, a uterus cancer, a breast cancer, an ovarian cancer, a liver cancer, an endometrial cancer, a lung cancer, in particular a non-small cell lung cancer or an invasive mucinous adenocarcinoma. The cancer can be a primary cancer or metastatic cancer.

[0064] The present disclosure also provides a method of treating a subject having an ErbB-2 and/or ErbB-3 positive aberrant cell, such as a cancer or tumor, said aberrant cell comprising a polynucleotide fusion as mentioned herein, and/or such a cell expressing a polypeptide fusion encoded therefrom, said method comprising administering to the subject a therapeutic amount of an ErbB-2 and/or ErbB-3 targeting agent. Preferably, the administration of said agent is preceded by detecting a polynucleotide or polypeptide fusion as mentioned herein.

[0065] The present disclosure also provides a method for inhibiting the progression in a subject having an ErbB-2 and ErbB-3 positive aberrant cell, said aberrant cell comprising a polynucleotide fusion as mentioned herein, and/or expressing a polypeptide fusion encoded therefrom, said method comprising administering to the subject a therapeutic amount of an ErbB-2 and/or ErbB-3 targeting agent. Preferably, the administration of said agent is preceded by detecting a polynucleotide or polypeptide fusion as mentioned herein.

[0066] The present disclosure also provides an ErbB-2 and/or ErbB-3 targeting agent for use in the treatment of a subject that has an ErbB-2 and ErbB-3 positive cancer or tumor comprising a polynucleotide fusion as mentioned herein, and/or expressing a polypeptide fusion encoded therefrom, said treatment comprising administering a therapeutic amount of the ErbB-2 and/or ErbB-3 targeting agent to the subject. Preferably, the administration of said agent is preceded by detecting a polynucleotide or polypeptide fusion as mentioned herein.

[0067] The present disclosure also provides a method for diagnosing a subject of having an aberrant cell that comprises a polynucleotide fusion as mentioned herein, or a polypeptide encoded therefrom, the method comprising testing a sample obtained from a subject to detect the presence of the fusion in the sample.

[0068] The present disclosure also provides a method of treatment or use of an ERB2 and/or Erb3 targeting agent, wherein a subject is screened for the presence of an NRG1 fusion as mentioned herein, followed by administration of the Erb2 and/or Erb3 agent.

[0069] The present disclosure also includes in vivo models, such as xenograft or transgenic animal models expressing within their genome or engrafted aberrant cells comprising a polynucleotide fusion as mentioned herein, and/or expressing a polypeptide fusion encoded therefrom, and treatment of such models with an ERB2 and/or Erb3 targeting agent or other targeting agent for evaluation of therapeutic activity of such agent. Preferably, the animal model is a non-human animal model.

### DETAILED DESCRIPTION OF THE INVENTION

[0070] The present disclosure provides fusions involving NRG1 and novel fusion partners, as well as polypeptide fusions encoded therefrom. Also, the present disclosure provides fusions involving NRG1 with previously undisclosed fusion junctions, as well as polypeptide fusions encoded therefrom.

[0071] In general terms, the present disclosure provides fusions involving NRG1 and a fusion partner selected from VAPB, CADM1, CD44, SLC3A2, VTCN1, CDH1, CXADR, GTF2E2, CSMD1, PTN, ST14, THBS1, AGRN, PVALB, APP, WRN, DAAM1, ASPH, NOTCH2, CD74, SDC4, SLC4A4, ZFAT or DSCAML1. Said fusions are denoted therein as VAPB-NRG1, CADM1-NRG1, CD44-NRG1, SLC3A2-NRG1, VTCN1-NRG1, CDH1-NRG1, CXADR-NRG1, GTF2E2-NRG1, CSMD1-NRG1, PTN-NRG1, ST14-NRG1, THBS1-NRG1, AGRN-NRG1, PVALB-NRG1, APP-NRG1, WRN-NRG1, DAAM1-NRG1, ASPH-NRG1, NOTCH2-NRG1, CD74-NRG1, SDC4-NRG1, SLC4A4-NRG1, ZFAT-NRG1 or DSCAML1-NRG1. The presence of any one of the NRG1 fusions of the present disclosure, be it a polynucleotide or a polypeptide translated therefrom, is indicative of the presence of an aberrant cell, such as a cancer or a tumor.

### NRG1

[0072] The NRG1-gene codes for various isoforms of NRG1. Various isoforms and their expected function are described in Adelaide et al. Genes Chromosomes Cancer, August; 37(4):333-45 (2003). GGF and GGF2 isoforms contain a kringle-like sequence plus Ig and EGF-like domains; and the SMDF isoform shares only the EGF-like domain with other isoforms. The receptors for NRG1 isoforms are the ErbB family of tyrosine kinase transmembrane receptors. The family is also referred to as the human epidermal growth factor (EGF) receptor family (HER). The family has four members: ErbB (Erythroblastoma)-1, ErbB-2, ErbB-3 and ErbB-4. The receptors (reviewed in Yarden and Pines, Nat Rev Cancer. 2012 Jul. 12; 12(8):553-63) are widely expressed on epithelial cells. Upregulation of HER receptors or their ligands, such as heregulin (HRG) or epidermal growth factor (EGF), is a frequent event in human cancer (Wilson, Fridlyand et al., Nature. 2012 Jul. 26; 487(7408): 505-509). Overexpression of ErbB-1 and ErbB-2 in particular occurs in epithelial tumors and is associated with tumor invasion, metastasis, resistance to chemotherapy, and poor prognosis (Zhang, H., Berezov, A., Wang, Q., Zhang, G., Drebin, J., Murali, R., et al. (2007) Erbb receptors: from oncogenes to targeted cancer therapies. J. Clin. Invest., 117, 2051-2058). In the normal breast, ErbB-3 has been shown to be important in the growth and differentiation of luminal epithelium. For instance, loss/inhibition of ErbB-3 results in selective expansion of the basal over the luminal epithelium (Balko, Miller et al., 2012 PNAS Jan. 3, 2012 109 (1) 221-226). Binding of ligand to the extracellular domain of a receptor tyrosine kinase induces receptor dimerization, both between the same (homodimerization) and different (heterodimerization) receptor subtypes. Dimerization can activate the intracellular tyrosine kinase domains, which undergo autophosphorylation and, in turn, can activate a number of downstream pro-proliferative signaling pathways, including those mediated by mitogen-activated protein kinases (MAPK) and the pro-survival pathway Akt (reviewed in Yarden and Pines, 2012). ErbB-3 can be activated by engagement of its ligands. These ligands include but are not limited to neuregulin (NRG) and heregulin (HRG), and NRG1 fusions.

[0073] Various NRG1 fusion genes are described in Dhanasekaran et al. Nature Communications 5:5893, 2014, and in Jonna et al., Clin Cancer Res Aug. 15 2019, 25 (16) 4966-4972.

[0074] The term “NRG1” as used herein is not meant to be limited to any form, such as a protein, RNA, mRNA, cDNA or DNA sequence, but to include all such forms, unless the context makes clear which form is intended. The NRG1 gene and the isoforms are known under a number of different aliases such as: Neuregulin 1; Pro-NRG1; HRGA; SMDF; HGL; GGF; NDF; NRG1 Intronic Transcript 2 (Non-Protein Coding); Heregulin, Alpha (45 kD, ERBB2 P185-Activator); Acetylcholine Receptor-Inducing Activity; Pro-Neuregulin-1, Membrane-Bound Isoform; Sensory And Motor Neuron Derived Factor; Neu Differentiation Factor; Glial Growth Factor 2; NRG1-IT2; MSTP131; MST131; ARIA; GGF2; HRG1; and HRG. External Ids for NRG1 Gene are HGNC: 7997; Entrez Gene: 3084; Ensembl: ENSG00000157168; OMIM: 142445 and UniProtKB: Q02297. For the avoidance of doubt, with an NRG1 sequence is meant any polynucleotide sequence, including the coding sequence or any exon, but also any polypeptide sequence, or any portion thereof, such as from NCBI Reference Sequence NM_001159999.3 or allelic variants of NM_001159999.3. Preferably, the full polynucleotide sequence of NRG1 of the present disclosure as transcribed is according to SEQ ID NO: 138 and the translated NRG1 polypeptide sequence is according to SEQ ID NO: 152.

[0075] Preferably, the part of the polynucleotide fusion that encodes an NRG1 protein sequence, or exon of NRG1, further comprises or encodes an EGF-like domain of NRG1. The NRG1-gene, for example the 3′ end of the NRG1 gene, in the fusion preferably comprises the coding sequence of exons 6, 7 or 8. This domain is encoded by a 3′ located part of the NRG1 gene (e.g. exons 6-8) and is necessary for binding to ErbB-3. An NRG1-fusion gene preferably comprises a nucleic acid sequence coding for an EGF-like domain of NRG1. The NRG1-fusions of the disclosure preferably retain an in-frame coding region for this EGF-like domain at the 3′ end of the fusion molecule. An EGF-like domain is a sequence of typically about thirty to forty amino acid residues long of which the prototype is found in the sequence of epidermal growth factor (EGF) [PMID: 2288911, PMID: 6334307, PMID: 1522591, PMID: 6607417, PMID: 3282918, PMID: 11498013]. It is known to be present, in a more or less conserved form, in a large number of other, mostly animal proteins. A common feature of EGF-like domains is that they are found in the extracellular domain of membrane-bound proteins or in proteins known to be secreted (exception: prostaglandin G/H synthase). The EGF domain typically includes six cysteine residues which have been shown (in EGF) to be involved in disulphide bonds. The main structure is a two-stranded beta-sheet followed by a loop to a C-terminal short two-stranded sheet. Subdomains between the conserved cysteines vary in length. An exemplary EGF-like domain of the present disclosure is preferably comprised by exons 6-8, more preferably 6 and 7 of NCBI Reference Sequence NM_001159999.3 but the present disclosure is relevant for any functional EGF-like domain of NRG1. An EGF-like domain of NRG1 thus preferably comprises exemplary sequence HLVKCAEKEKTFCVNGGECFMVKDLSNPSRYLCKCPNEFTGDRCQNYVMASF (SEQ ID: 163), or an allelic variant thereof having at least 85% identity thereto, or at least 90%, 92%, 94%, 95%, 96% or even at least 98% identity thereto.

[0076] Any NRG1 fusion polynucleotide of the present disclosure preferably comprises at least a 5′ portion of VAPB, CADM1, CD44, SLC3A2, VTCN1, CDH1, CXADR, GTF2E2, CSMD1, PTN, ST14, THBS1, AGRN, PVALB, APP, WRN, DAAM1, ASPH, NOTCH2, CD74, SDC4, SLC4A4, ZFAT or DSCAML1 as a fusion partner, fused to a 3′ portion of an NRG1 nucleic acid sequence. The translated polypeptide fusion comprises a free C-terminus of the NRG1 fusion polypeptide and a free N-terminus of the fusion partner. To reflect this orientation at the molecular fusion level, any fusion partner of NRG1 is mentioned first, followed by NRG1 as its fusion partner.

### VAPB

[0077] VAPB or Vesicle-associated membrane protein-associated protein B/C is known under a number of different names such as VAMP Associated Protein B and C; VAMP (Vesicle-Associated Membrane Protein)-Associated Protein B And C; VAP-B; VAPB; ALS8; VAMP-Associated 33 KDa Protein; VAMP-Associated Protein B/C; VAMP-B/VAMP-C; VAP-B/VAP-C; VAMP-B and VAP-C. External Ids for VAPB Gene are HGNC: 12649; Entrez Gene: 9217; Ensembl: ENSG00000124164; OMIM: 605704; and UniProtKB: 095292. The term “VAPB” as used herein is not meant to be limited to any form, such as a protein, RNA, mRNA, cDNA or DNA sequence, but to include all such forms, unless the context makes clear which form is intended. For the avoidance of doubt, with a VAPB sequence is meant any polynucleotide sequence, including the coding sequence or any exon, but also any polypeptide sequence, or any portion thereof, such as from NCBI Reference Sequence NM_004738.4, or any allelic variant thereof.

### CADM1

[0078] CADM1 or Cell Adhesion Molecule 1 is known under a number of different names such as Tumor Suppressor In Lung Cancer 1; TSLC1; TSLC-1; Spermatogenic Immunoglobulin Superfamily; SgIgSF; SgIGSF; Immunoglobulin Superfamily Member 4; IGSF4; IgSF4; IGSF4A; Synaptic Cell Adhesion Molecule; SynCAM1; SYNCAM1; SynCAM; SYNCAM; Nectin-Like Protein 2; NECL2; NECL-2; Nectin-Like 2; Necl-2; RA175; ST17; BL2; Immunoglobulin Superfamily, Member 4D Variant 1; Immunoglobulin Superfamily, Member 4D Variant 2; Immunoglobulin Superfamily, Member 4; TSLC1/Nectin-Like 2/IGSF4; Truncated CADM1 Protein and STSLC-1. External Ids for CADM1 are HGNC: 5951; Entrez Gene: 23705; Ensembl: ENSG00000182985; OMIM: 605686; and UniProtKB: Q9BY67. The term “CADM1” as used herein is not meant to be limited to any form, such as a protein, RNA, mRNA, cDNA or DNA sequence, but to include all such forms, unless the context specifies the intended form as meant. For the avoidance of doubt, with a CADM1 sequence is meant any polynucleotide sequence, including the coding sequence or any exon, but also any polypeptide sequence, or any portion thereof, such as from NCBI Reference Sequence NM_001301045.1, or any allelic variant thereof.

### CD44

[0079] CD44 or is known under a number of different names such as CD44 Molecule (Indian Blood Group); Hematopoietic Cell E- And L-Selectin Ligand; GP90 Lymphocyte Homing/Adhesion Receptor; Chondroitin Sulfate Proteoglycan 8; Extracellular Matrix Receptor III; Heparan Sulfate Proteoglycan; Phagocytic Glycoprotein 1; Hyaluronate Receptor; Hermes Antigen; CD44 Antigen; ECMR-III; HUTCH-I; Epican; MDU2; MDU3; MIC4; LHR; CD44 Antigen (Homing Function And Indian Blood Group System); Homing Function And Indian Blood Group System; Cell Surface Glycoprotein CD44; Indian Blood Group Antigen; Phagocytic Glycoprotein I; Soluble CD44; CDW44; CSPG8; HCELL; CDw44; PGP-1; MC56; Pgp1; and IN. External Ids for CD44 Gene are HGNC: 1681; Entrez Gene: 960; Ensembl: ENSG00000026508; OMIM: 107269; and UniProtKB: P16070. The term “CD44” as used herein is not meant to be limited to any form, such as a protein, RNA, mRNA, cDNA or a DNA sequence, but to include all such forms, unless the context specifies the intended form as meant. For the avoidance of doubt, with a CD44 sequence is meant any polynucleotide sequence, including the coding sequence or any exon, but also any polypeptide sequence, or any portion thereof, such as from NCBI Reference Sequence NM_000610.4, or any allelic variant thereof.

### SLC3A2

[0080] SLC3A2 or Solute Carrier Family 3 Member 2 is known under a number of different names such as Lymphocyte Activation Antigen 4F2 Large Subunit; Solute Carrier Family 3 (Activators Of Dibasic And Neutral Amino Acid Transport), Member 2; Antigen Identified By Monoclonal Antibodies 4F2, TRA1.10, TROP4, And T43; Solute Carrier Family 3 (Amino Acid Transporter Heavy Chain), Member 2; 4F2 Cell-Surface Antigen Heavy Chain; CD98 Heavy Chain; 4F2HC; MDU1; Antigen Defined By Monoclonal Antibody 4F2, Heavy Chain; Antigen Defined By Monoclonal Antibody 4F2; 4F2 Heavy Chain Antigen; 4F2 Heavy Chain; CD98 Antigen; CD98HC; 4T2HC; NACAE; CD98 and 4F2. External Ids for SLC3A2 are HGNC: 11026; Entrez Gene: 6520; Ensembl: ENSG00000168003; OMIM: 158070; and UniProtKB: P08195. The term “SLC3A2” as used herein is not meant to be limited to any form, such as a protein, RNA, mRNA, cDNA or a DNA sequence, but to include all such forms, unless the context specifies the intended form as meant. For the avoidance of doubt, with a SCL3A2 transcript version 6 sequence is meant any polynucleotide sequence, including the coding sequence or any exon, but also any polypeptide sequence, or any portion thereof, such as from NCBI Reference Sequence NM_001013251.3, or any allelic variant thereof. And with a SCL3A2 transcript version 3 sequence is meant any polynucleotide sequence, including the coding sequence or any exon, but also any polypeptide sequence, or any portion thereof, such as from NCBI Reference Sequence NM_002394.6, or any allelic variant thereof.

### VTCN1

[0081] VTCN1 is known under a number of different names such as V-Set Domain Containing T Cell Activation Inhibitor 1; B7-H4; B7H4; Immune Costimulatory Protein B7-H4; B7 Superfamily Member 1; B7 Family Member, H4; B7 Homolog 4; B7h.5; B7S1; T-Cell Costimulatory Molecule B7x; Protein B7S1; FLJ22418; PRO1291; VCTN1; VTCN1 and B7X. External Ids for VTCN1 are HGNC: 28873; NCBI Entrez Gene: 79679 Ensembl: ENSG00000134258 OMIM®: 608162 and UniProtKB/Swiss-Prot: Q7Z7D3. The term “VTCN1” as used herein is not meant to be limited to any form, such as a protein, RNA, mRNA, cDNA or a DNA sequence, but to include all such forms, unless the context specifies the intended form as meant. For the avoidance of doubt, with a VTCN1 sequence is meant any polynucleotide sequence, including the coding sequence or any exon, but also any polypeptide sequence, or any portion thereof, such as from NCBI Reference Sequence NM_024626.4, or any allelic variant thereof.

### CDH1

[0082] CDH1 or Cadherin 1 is known under a number of different names such as Uvomorulin; Cadherin 1, Type 1, E-Cadherin (Epithelial); Epithelial Cadherin; E-Cadherin; Cadherin-1; CAM 120/80; CD324; CDHE; UVO; Calcium-Dependent Adhesion Protein, Epithelial; Epididymis Secretory Sperm Binding Protein; Cadherin 1, E-Cadherin (Epithelial); Cell-CAM 120/80; CD324 Antigen; E-Cadherin; Arc-1; BCDS1; ECAD; and LCAM. External Ids for CDH1 are HGNC: 1748; NCBI Entrez Gene: 999; Ensembl: ENSG00000039068; OMIM®: 192090 and UniProtKB/Swiss-Prot: P12830. The term “CDH1” as used herein is not meant to be limited to any form, such as a protein, RNA, mRNA, cDNA or a DNA sequence, but to include all such forms, unless the context specifies the intended form as meant. For the avoidance of doubt, with a CDH1 sequence is meant any polynucleotide sequence, including the coding sequence or any exon, but also any polypeptide sequence, or any portion thereof, such as from NCBI Reference Sequence NM_001317185.2, or any allelic variant thereof.

### CXADR

[0083] CXADR, or coxsackie virus and adenovirus receptor, is a type I membrane receptor for group B coxsackieviruses and subgroup C adenoviruses. Several transcript variants encoding different isoforms have been found for this gene. Diseases associated with CXADR include Myocarditis and Shipyard Eye. Among its related pathways are Adhesion and Allograft rejection. It is a component of the epithelial apical junction complex that may function as a homophilic cell adhesion molecule and is essential for tight junction integrity. Also involved in transepithelial migration of leukocytes through adhesive interactions with JAML a transmembrane protein of the plasma membrane of leukocytes. The interaction between both receptors also mediates the activation of gamma-delta T-cells, a subpopulation of T-cells residing in epithelia and involved in tissue homeostasis and repair. Upon epithelial CXADR-binding, JAML induces downstream cell signaling events in gamma-delta T-cells through PI3-kinase and MAP kinases. It results in proliferation and production of cytokines and growth factors by T-cells that in turn stimulate epithelial tissues repair. External Ids for CXADR include HGNC: 2559 NCBI Entrez Gene: 1525 Ensembl: ENSG00000154639 OMIM®: 602621 UniProtKB/Swiss-Prot: P78310. The term “CXADR” as used herein is not meant to be limited to any form, such as a protein, RNA, mRNA, cDNA or a DNA sequence, but to include all such forms, unless the context specifies the intended form as meant. For the avoidance of doubt, with a CXADR sequence is meant any polynucleotide sequence, including the coding sequence or any exon, but also any polypeptide sequence, or any portion thereof, such as from NCBI Reference Sequence NM_001207063.2, or any allelic variant thereof.

### GTF2E2

[0084] GTF2E2, or general transcription factor IIE (TFIIE), is part of the RNA polymerase II transcription initiation complex, recruiting TFIIH and being essential for promoter clearance by RNA polymerase II. TFIIE is a heterodimer (and sometimes heterotetramer) of alpha and beta subunits. The protein encoded by this gene represents the beta subunit of TFIIE. Diseases associated with GTF2E2 include Trichothiodystrophy 6, Nonphotosensitive and Trichothiodystrophy. Among its related pathways are Apoptotic Pathways in Synovial Fibroblasts and CCR5 Pathway in Macrophages. External Ids for GTF2E2 include HGNC: 4651 NCBI Entrez Gene: 2961 Ensembl: ENSG00000197265 OMIM®: 189964 UniProtKB/Swiss-Prot: P29084. The term “GTF2E2” as used herein is not meant to be limited to any form, such as a protein, RNA, mRNA, cDNA or a DNA sequence, but to include all such forms, unless the context specifies the intended form as meant. For the avoidance of doubt, with a GTF2E2 sequence is meant any polynucleotide sequence, including the coding sequence or any exon, but also any polypeptide sequence, or any portion thereof, such as from NCBI Reference Sequence NM_002095.6, or any allelic variant thereof.

### CSMD1

[0085] CSMD1 (or CUB And Sushi Multiple Domains 1) is a protein associated with diseases including autism and schizophrenia. External Ids for CSMD1 include HGNC: 14026 NCBI Entrez Gene: 64478 Ensembl: ENSG00000183117 OMIM®: 608397 UniProtKB/Swiss-Prot: Q96PZ7. The term “CSMD1” as used herein is not meant to be limited to any form, such as a protein, RNA, mRNA, cDNA or a DNA sequence, but to include all such forms, unless the context specifies the intended form as meant. For the avoidance of doubt, with a CSMD1 sequence is meant any polynucleotide sequence, including the coding sequence or any exon, but also any polypeptide sequence, or any portion thereof, such as from NCBI Reference Sequence NM_033225.6, or any allelic variant thereof.

### PTN

[0086] Pleiotrophin, or PTN, as a protein is a secreted heparin-binding growth factor. The protein has significant roles in cell growth and survival, cell migration, angiogenesis and tumorigenesis. PTN (Pleiotrophin) is a Protein Coding gene. Diseases associated with PTN include Peyronie's Disease and Nasal Cavity Olfactory Neuroblastoma. Among its related pathways are GPCR Pathway and Apoptotic Pathways in Synovial Fibroblasts. External Ids for PTN include HGNC: 9630 NCBI Entrez Gene: 5764 Ensembl: ENSG00000105894 OMIM®: 162095 UniProtKB/Swiss-Prot: P21246. The term “PTN” as used herein is not meant to be limited to any form, such as a protein, RNA, mRNA, cDNA or a DNA sequence, but to include all such forms, unless the context specifies the intended form as meant. For the avoidance of doubt, with a PTN sequence is meant any polynucleotide sequence, including the coding sequence or any exon, but also any polypeptide sequence, or any portion thereof, such as from NCBI Reference Sequence NM_001321386.2, or any allelic variant thereof.

### ST14

[0087] ST14 or ST14 Transmembrane Serine Protease Matriptase, is an epithelial-derived, integral membrane serine protease. This protease forms a complex with the Kunitz-type serine protease inhibitor, HAI-1, and is found to be activated by sphingosine 1-phosphate. This protease has been shown to cleave and activate hepatocyte growth factor/scattering factor, and urokinase plasminogen activator, which suggest the function of this protease as an epithelial membrane activator for other proteases and latent growth factors. Diseases associated with ST14 include various types of ichthyosis. Among its related pathways are Developmental Biology and Adhesion. External Ids for ST14 include HGNC: 11344 NCBI Entrez Gene: 6768 Ensembl: ENSG00000149418 OMIM®: 606797 UniProtKB/Swiss-Prot: Q9Y5Y6. The term “ST14” as used herein is not meant to be limited to any form, such as a protein, RNA, mRNA, cDNA or a DNA sequence, but to include all such forms, unless the context specifies the intended form as meant. For the avoidance of doubt, with a ST14 sequence is meant any polynucleotide sequence, including the coding sequence or any exon, but also any polypeptide sequence, or any portion thereof, such as from NCBI Reference Sequence NM_021978.4, or any allelic variant thereof.

### THBS1

[0088] THBS1, or Thrombospondin 1, is a subunit of a disulfide-linked homotrimeric protein. This protein is an adhesive glycoprotein that mediates cell-to-cell and cell-to-matrix interactions. This protein can bind to fibrinogen, fibronectin, laminin, type V collagen and integrins alpha-V/beta-1. This protein has been shown to play roles in platelet aggregation, angiogenesis, and tumorigenesis. Diseases associated with THBS1 include Thrombotic Thrombocytopenia Purpura and Peters-Plus Syndrome. Among its related pathways are Proteoglycans in cancer and Degradation of the extracellular matrix. Gene Ontology (GO) annotations related to this gene include calcium ion binding and heparin binding. External Ids for THBS1 include HGNC: 11785 NCBI Entrez Gene: 7057 Ensembl: ENSG00000137801 OMIM®: 188060 UniProtKB/Swiss-Prot: P07996. The term “THBS1” as used herein is not meant to be limited to any form, such as a protein, RNA, mRNA, cDNA or a DNA sequence, but to include all such forms, unless the context specifies the intended form as meant. For the avoidance of doubt, with a THBS1 sequence is meant any polynucleotide sequence, including the coding sequence or any exon, but also any polypeptide sequence, or any portion thereof, such as from NCBI Reference Sequence NM_003246.4, or any allelic variant thereof.

### AGRN

[0089] AGRN or Agrin, is one of several proteins that are critical in the development of the neuromuscular junction. The encoded protein contains several laminin G, Kazal type serine protease inhibitor, and epidermal growth factor domains. Additional post-translational modifications occur to add glycosaminoglycans and disulfide bonds. In one family with congenital myasthenic syndrome affecting limb girdle muscles, a mutation in this gene was found. Diseases associated with AGRN include Myasthenic Syndrome, Congenital, 8 and Presynaptic Congenital Myasthenic Syndromes. Among its related pathways are Agrin Interactions at Neuromuscular Junction and Blood-Brain Barrier and Immune Cell Transmigration. External Ids for AGRN include HGNC: 329 NCBI Entrez Gene: 375790 Ensembl: ENSG00000188157 OMIM®: 103320 UniProtKB/Swiss-Prot: 000468. The term “AGRN” as used herein is not meant to be limited to any form, such as a protein, RNA, mRNA, cDNA or a DNA sequence, but to include all such forms, unless the context specifies the intended form as meant. For the avoidance of doubt, with a AGRN sequence is meant any polynucleotide sequence, including the coding sequence or any exon, but also any polypeptide sequence, or any portion thereof, such as from NCBI Reference Sequence NM_001305275.2, or any allelic variant thereof.

### PVALB

[0090] PVALP, or Parvalbumin, is a high affinity calcium ion-binding protein that is structurally and functionally similar to calmodulin and troponin C. The encoded protein is thought to be involved in muscle relaxation. Diseases associated with PVALB include Fish allergy and fetal alcohol syndrome. Gene ontology annotations related to this gene include calcium ion binding and protein heterodimerization activity. External Ids for PVALB include HGNC: 9704 NCBI Entrez Gene: 5816 Ensembl: ENSG00000100362 OMIM®: 168890 UniProtKB/Swiss-Prot: P20472. The term “PVALB” as used herein is not meant to be limited to any form, such as a protein, RNA, mRNA, cDNA or a DNA sequence, but to include all such forms, unless the context specifies the intended form as meant. For the avoidance of doubt, with a PVALB sequence is meant any polynucleotide sequence, including the coding sequence or any exon, but also any polypeptide sequence, or any portion thereof, such as from NCBI Reference Sequence NM_002854.3, or any allelic variant thereof.

### APP

[0091] APP is known under a number of different names such as Amyloid Beta Precursor Protein, Alpha-SAPP, AD1, Alzheimer Disease Amyloid A4 Protein Homolog, Amyloid Beta (A4) Precursor Protein, Alzheimer Disease Amyloid Protein, Cerebral Vascular Amyloid Peptide, Amyloid-Beta Precursor Protein, Amyloid Precursor Protein, Peptidase Nexin-II, Protease Nexin-II, PN-II, PreA4, ABPP, APPI, CVAP, Beta-Amyloid Precursor Protein, Testicular Tissue Protein Li 2, Beta-Amyloid Peptide (1-40), Beta-Amyloid Peptide (1-42), Amyloid Beta A4 Protein, Beta-Amyloid Peptide, Alzheimer Disease, CTFgamma, ABETA, AAA, PN2, and A4. External Ids for APP Gene are HGNC: 620; Entrez Gene: 351; Ensembl: ENSG00000142192; OMIM®: 104760 and UniProtKB/Swiss-Prot: P05067. The term “APP” as used herein is not meant to be limited to any form, such as a protein, RNA, mRNA, cDNA or a DNA sequence, but to include all such forms, unless the context specifies the intended form as meant. For the avoidance of doubt, with a APP sequence is meant any polynucleotide sequence, including the coding sequence or any exon, but also any polypeptide sequence, or any portion thereof, such as from NCBI Reference Sequence NM_001136130.3, or any allelic variant thereof.

### WRN

[0092] WRN or Werner Syndrome ATP-Dependent Helicase is known under a number of different names such as WRN RecQ Like Helicase; RECQL2; RECQ3; Werner Syndrome RecQ Like Helicase; DNA Helicase, RecQ-Like Type 3; RecQ Protein-Like 2; Exonuclease WRN; Werner Syndrome, RecQ Helicase-Like; Werner Syndrome; EC 3.6.4.12; RECQL3; and RecQ3. External Ids for WRN Gene are HGNC: 12791; NCBI Entrez Gene: 7486; Ensembl: ENSG00000165392; OMIM®: 604611; and UniProtKB/Swiss-Prot: Q14191. The term “WRN” as used herein is not meant to be limited to any form, such as a protein, RNA, mRNA, cDNA or a DNA sequence, but to include all such forms, unless the context specifies the intended form as meant. For the avoidance of doubt, with a WRN sequence is meant any polynucleotide sequence, including the coding sequence or any exon, but also any polypeptide sequence, or any portion thereof, such as from NCBI Reference Sequence NM_000553.6, or any allelic variant thereof.

### DAAM1

[0093] DAAM1 or Disheveled Associated Activator Of Morphogenesis 1 is known under a number of different names such as KIAA0666; and Disheveled-Associated Activator Of Morphogenesis 1. External Ids for DAAM1 Gene are HGNC: 18142; NCBI Entrez Gene: 23002; Ensembl: ENSG00000100592; OMIM®: 606626; and UniProtKB/Swiss-Prot: Q9Y4D1. The term “DAAM1” as used herein is not meant to be limited to any form, such as a protein, RNA, mRNA, cDNA or a DNA sequence, but to include all such forms, unless the context specifies the intended form as meant. For the avoidance of doubt, with a DAAM1 sequence is meant any polynucleotide sequence, including the coding sequence or any exon, but also any polypeptide sequence, or any portion thereof, such as from NCBI Reference Sequence NM_001270520.2, or any allelic variant thereof.

### ASPH

[0094] ASPH or Aspartate Beta-Hydroxylase is known under a number of different names such as BAH, CASQ2BP1, JCTN, HAAH, Aspartyl/Asparaginyl Beta-Hydroxylase, Peptide-Aspartate Beta-Dioxygenase, ASP Beta-Hydroxylase, Junctate, Junctin, Humbug, Cardiac Junctin, EC 1.14.11.16, A Beta H-J-J, FDLAB and AAH. External IDs for ASPH Gene are HGNC: 757; Entrez Gene: 444; Ensembl: ENSG00000198363; OMIM®: 600582 and UniProtKB/Swiss-Prot: Q12797. The term “ASPH” as used herein is not meant to be limited to any form, such as a protein, RNA, mRNA, cDNA or a DNA sequence, but to include all such forms, unless the context specifies the intended form as meant. For the avoidance of doubt, with a ASPH sequence is meant any polynucleotide sequence, including the coding sequence or any exon, but also any polypeptide sequence, or any portion thereof, such as from NCBI Reference Sequence NM_001164750.2, or any allelic variant thereof.

### NOTCH2

[0095] NOTCH2 or Notch Receptor 2 is known under a number of different names such as Notch 2; Neurogenic Locus Notch Homolog Protein 2; HN2; Notch (Drosophila) Homolog 2; Notch Homolog 2 (Drosophila); Notch Homolog 2; HJCYS; and AGS2. External Ids for NOTCH2 Gene are HGNC: 7882; NCBI Entrez Gene: 4853; Ensembl: ENSG00000134250; OMIM®: 600275; and UniProtKB/Swiss-Prot: Q04721. The term “NOTCH2” as used herein is not meant to be limited to any form, such as a protein, RNA, mRNA, cDNA or a DNA sequence, but to include all such forms, unless the context specifies the intended form as meant. For the avoidance of doubt, with a NOTCH2 sequence is meant any polynucleotide sequence, including the coding sequence or any exon, but also any polypeptide sequence, or any portion thereof, such as from NCBI Reference Sequence NM_024408.4, or any allelic variant thereof.

### CD74

[0096] CD74 is known under a number of different names such as CD74 Molecule; DHLAG; CD74 Molecule, Major Histocompatibility Complex, Class II Invariant Chain; HLA Class II Histocompatibility Antigen Gamma Chain; Class II MHC-Associated Invariant Chain Peptide; HLA-DR Antigens-Associated Invariant Chain; Gamma Chain Of Class II Antigens; Ia-Associated Invariant Chain; MHC HLA-DR Gamma Chain; HLA-DR-Gamma; CLIP; Ia Antigen-Associated Invariant Chain; CD74 Antigen; Ia-GAMMA; HLADG; P33; II; and Ii. External Ids for CD74 Gene are HGNC: 1697; NCBI Entrez Gene: 972; Ensembl: ENSG00000019582; OMIM®: 142790; and UniProtKB/Swiss-Prot: P04233. The term “CD74” as used herein is not meant to be limited to any form, such as a protein, RNA, mRNA, cDNA or a DNA sequence, but to include all such forms, unless the context specifies the intended form as meant. For the avoidance of doubt, with a CD74 sequence is meant any polynucleotide sequence, including the coding sequence or any exon, but also any polypeptide sequence, or any portion thereof, such as from NCBI Reference Sequence NM_001025159.3, or any allelic variant thereof.

### SDC4

[0097] SDC4 or Syndecan 4 is known under a number of different names such as Amphiglycan; SYND4; Syndecan 4 (Amphiglycan, Ryudocan); Syndecan Proteoglycan 4; Ryudocan Core Protein; Syndecan-4; Ryudocan; and Ryudocan Amphiglycan. External Ids for SDC4 Gene are HGNC: 10661; NCBI Entrez Gene: 6385; Ensembl: ENSG00000124145; OMIM®: 600017; and UniProtKB/Swiss-Prot: P31431. The term “SDC4” as used herein is not meant to be limited to any form, such as a protein, RNA, mRNA, cDNA or a DNA sequence, but to include all such forms, unless the context specifies the intended form as meant. For the avoidance of doubt, with a SDC4 sequence is meant any polynucleotide sequence, including the coding sequence or any exon, but also any polypeptide sequence, or any portion thereof, such as from NCBI Reference Sequence NM_002999.4, or any allelic variant thereof.

### SLC4A4

[0098] SLC4A4 or Solute Carrier Family 4 Member 4 is known under a number of different names such as NBC1; HNBC1; HhNMC; NBC2; PNBC; Solute Carrier Family 4 (Sodium Bicarbonate Cotransporter), Member 4; Electrogenic Sodium Bicarbonate Cotransporter 1; Na(+)/HCO3(−) Cotransporter; SLC4A5; KNBC1; Sodium Bicarbonate Cotransporter 1 (Sodium Bicarbonate Cotransporter, Kidney; Sodium Bicarbonate Cotransporter, Pancreas); Solute Carrier Family 4, Sodium Bicarbonate Cotransporter, Member 4, Brain Type; Solute Carrier Family 4, Sodium Bicarbonate Cotransporter, Member 4; Solute Carrier Family 4, Sodium Bicarbonate Cotransporter, Member 5; Sodium Bicarbonate Cotransporter; NBCe1-A; NBCE1; KNBC; and NBC. External Ids for SLC4A4 Gene are HGNC: 11030; NCBI Entrez Gene: 8671; Ensembl: ENSG00000080493; OMIM®: 603345; and UniProtKB/Swiss-Prot: Q9Y6R1. The term “SLC4A4” as used herein is not meant to be limited to any form, such as a protein, RNA, mRNA, cDNA or a DNA sequence, but to include all such forms, unless the context specifies the intended form as meant. For the avoidance of doubt, with a SLC4A4 sequence is meant any polynucleotide sequence, including the coding sequence or any exon, but also any polypeptide sequence, or any portion thereof, such as from NCBI Reference Sequence NM_001098484.3, or any allelic variant thereof.

### ZFAT

[0099] ZFAT or Zing Finger And AT-Hook Domain Containing is known under a number of different names such as Zinc Finger Protein 406; KIAA1485; ZNF406; ZFAT1; Zinc Finger Protein ZFAT; Zinc Finger Gene In Autoimmune Thyroid Disease; Zinc Finger Gene In AITD Susceptibility Region; and AITD3. External Ids for ZFAT Gene are HGNC: 19899; NCBI Entrez Gene: 57623; Ensembl: ENSG00000066827; OMIM®: 610931; and UniProtKB/Swiss-Prot: Q9P243. The term “ZFAT” as used herein is not meant to be limited to any form, such as a protein, RNA, mRNA, cDNA or a DNA sequence, but to include all such forms, unless the context specifies the intended form as meant. For the avoidance of doubt, with a ZFAT sequence is meant any polynucleotide sequence, including the coding sequence or any exon, but also any polypeptide sequence, or any portion thereof, such as from NCBI Reference Sequence NM_020863.4, or any allelic variant thereof.

### DSCAML1

[0100] DSCAML1 or DS Cell Adhesion Molecule Like 1 is known under a number of different names such as KIAA1132; Down Syndrome Cell Adhesion Molecule-Like Protein 1; Down Syndrome Cell Adhesion Molecule 2; DSCAM2; Downs Syndrome Cell Adhesion Molecule Like 1; Down Syndrome Cell Adhesion Molecule Like 1; and DSCAM-Like 1. External Ids for DSCAML1 Gene are HGNC: 14656; NCBI Entrez Gene: 57453; Ensembl: ENSG00000177103; OMIM®: 611782; and UniProtKB/Swiss-Prot: Q8TD84. The term “DSCAML1” as used herein is not meant to be limited to any form, such as a protein, RNA, mRNA, cDNA or a DNA sequence, but to include all such forms, unless the context specifies the intended form as meant. For the avoidance of doubt, with a DSCAML1 sequence is meant any polynucleotide sequence, including the coding sequence or any exon, but also any polypeptide sequence, or any portion thereof, such as from NCBI Reference Sequence NM_020693.4, or any allelic variant thereof.

### NRG1 Polynucleotide Fusions

[0101] In accordance with the present disclosure, previously unknown genetic rearrangements that result in expression of an NRG1 fusion product, wherein NRG1 is fused with a fusion partner, are now provided. In particular are provided polynucleotide fusions comprising NRG1, including VAPB-NRG1, CADM1-NRG1, CD44-NRG1, SLC3A2-NRG1, VTCN1-NRG1, CDH1-NRG1, CXADR-NRG1, GTF2E2-NRG1, CSMD1-NRG1, PTN-NRG1, ST14-NRG1, THBS1-NRG1, AGRN-NRG1, PVALB-NRG1, APP-NRG1, WRN-NRG1, DAAM1-NRG1, ASPH-NRG1, NOTCH2-NRG1, CD74-NRG1, SDC4-NRG1, SLC4A4-NRG1, ZFAT-NRG1, or DSCAML1-NRG1. In particular, such fusions are present or have been identified in human patients diagnosed with cancer and are mentioned in more details in the following section.

[0102] In certain embodiments, the NRG1 fusion may comprise additional downstream fusion partners 3′ of the nucleic acid sequence encoding the EGF-like domain.

### VAPB-NRG1 Polynucleotide Fusions

[0103] In accordance with the present disclosure, there is provided a polynucleotide comprising a VAPB nucleic acid sequence (or a portion of a VAPB nucleic acid sequence) fused with an NRG1 nucleic acid sequence (or a portion of an NRG1 nucleic acid sequence). Also included in said fusion are allelic variants of VAPB and NRG1 nucleic acid sequences.

[0104] Preferably, the VAPB nucleic acid sequence, or the portion thereof, comprises or consists of any one of SEQ ID NOs: 17-23, or an allelic variant of any one of SEQ ID NOs: 17-23, and the NRG1 nucleic acid sequence, or the portion thereof, comprises or consists of any one of SEQ ID NOs: 125-138, or an allelic variant of any one of SEQ ID NOs: 125-138. More preferably, the VAPB nucleic acid sequence comprises a portion of SEQ ID NOs: 23, or an allelic variant of SEQ ID NOs: 23, and the NRG1 nucleic acid sequence preferably comprises a portion of SEQ ID NOs: 138, or an allelic variant of SEQ ID NOs: 138. SEQ ID NOs: 17-22 correspond to the individual exons 1-6 of VAPB according to NM_004738.4, respectively. SEQ ID NO: 23 corresponds to exons 1-6 of VAPB according to NM_004738.4. SEQ ID NOs: 125-137 correspond to the individual exons 1-13 of the NRG1 sequence according to NM_001159999, respectively. SEQ ID NO: 138 corresponds to exons 1-13 of NRG1 according to NM_001159999.

[0105] In a preferred embodiment, the portion of the VAPB nucleic acid sequence comprises 2 to about 10, about 20, about 30, or up to about 40 or even all contiguous nucleic acids from any one of SEQ ID NOs: 17-23, or an allelic variant of any one of SEQ ID NOs: 17-23, and the portion of the NRG1 nucleic acid sequence comprises 2 to about 10, about 20, about 30, or up to about 40 or even all contiguous nucleic acids of any one of SEQ ID NOs: 125-138, or an allelic variant of any one of SEQ ID NOs: 125-138.

[0106] Preferably, the VAPB nucleic acid sequence, or the portion thereof, is 5′ to the NRG1 nucleic acid sequence, or the portion thereof.

[0107] Preferably, the polynucleotide comprising a VAPB nucleic acid sequence of VAPB, or a portion of said sequence, fused with a NRG1 nucleic acid sequence, or portion of said sequence, comprises or encodes an EGF-like domain of NRG1. An aberrant cell comprising the VAPB-NRG1 polynucleotide fusion or expressing the polypeptide fusion, comprises or encodes an EGF-like domain of NRG1. For detection, diagnosis or identification purposes, it may suffice to show that the fusion junction between VAPB and NRG1 is in-frame and occurs at a position such that the resulting fusion product, nucleic acid or protein, comprises an EGF-like domain of NRG1. Said EGF-like domain is preferably the EGF-like domain according to SEQ ID NO: 163, or an allelic variant thereof having at least 85% identity to SEQ ID NO: 163, preferably at least 90% identity, 92%, 94%, 96% or more preferably at least 98% sequence identity thereto.

[0108] Preferably, the allelic variant of the VAPB nucleic acid sequences has at least 85% identity to any one of SEQ ID NOs: 17-23, preferably at least 90% identity, 92%, 94%, 96% or more preferably at least 98% sequence identity thereto; and the allelic variant of the NRG1 nucleic acid sequences has at least 85% identity to any one of SEQ ID NOs: 125-138, preferably at least 90% identity, 92%, 94%, 96% or more preferably at least 98% sequence identity thereto.

[0109] In a preferred embodiment, the polynucleotide comprising the VAPB nucleic acid fused with the NRG1 nucleic acid, comprises 2 to about 10, about 20, about 30, or up to about 40 or even all contiguous nucleic acids from SEQ ID NO: 3, preferably including the nucleic acids at positions 43 and 44. The number of contiguous nucleic acids may be 2, 3, 4, 5, 6, 7, 8, 9, 10, 11, 12, 13, 14, 15, 16, 17, 18, 19, 20, 21, 22, 23, 24, 25, 26, 27, 28, 29, 30, 31, 32, 33, 34, 35, 36, 37, 38, 39, 40 or all nucleic acids of SEQ ID NO: 3, preferably including at least the nucleic acids at positions 43 and 44.

[0110] In a preferred embodiment, there is provided a polynucleotide according to SEQ ID NO: 3, or a polynucleotide which comprises about 20, about 30, about 40 or all contiguous nucleic acids from SEQ ID NO: 3, preferably including the nucleic acids at positions 43 and 44. The number of contiguous nucleic acids may be 18, 19, 20, 21, 22, 23, 24, 25, 26, 27, 28, 29, 30, 31, 32, 33, 34, 35, 36, 37, 38, 39, 40 or all nucleic acids of SEQ ID NO: 3, preferably including at least the nucleic acids at positions 43 and 44.

[0111] Preferably, the polynucleotide part of the NRG1 nucleic acid sequence (or the allelic variant thereof), encodes an EGF-like domain of NRG1, preferably the EGF-like domain according to SEQ ID NO: 163.

[0112] In an alternative aspect, there is provided a polynucleotide comprising a portion of exon 1 of VAPB, or an allelic variant thereof, fused with a portion of exon 2 of NRG1, or an allelic variant thereof. Preferably, exon 1 of VAPB is that of SEQ ID NO: 17. Preferably, exon 2 of NRG1 is that of SEQ ID NO: 126. Said portion of exon 1 of VAPB preferably comprises or consists of SEQ ID NO: 1, or an allelic variant thereof. Said portion of exon 2 of NRG1 preferably comprises or consists of SEQ ID NO: 2, or an allelic variant thereof. When present in an aberrant cell of a patient or subject, said polynucleotide fusion preferably further includes any sequence 3′ from exon 2 of NRG1, but to allow detection of the fusion junction using a polynucleotide-based detection assay, it may suffice that at least SEQ ID NOs 17 and 126 are present. Any sequence 3′ from exon 2 of NRG1 comprises or consists of one or all of SEQ ID NOs: 127-137 (or any allelic variant of SEQ ID NOs: 127-137).

[0113] Preferably, the allelic variant of exon 1 of VAPB has at least 85% identity to SEQ ID NO: 17, preferably at least 90% identity, 92%, 94%, 96% or more preferably at least 98% sequence identity thereto and the allelic variant of exon 2 of NRG1 has at least 85% identity to SEQ ID NO: 126, preferably at least 90% identity, 92%, 94%, 96% or more preferably at least 98% sequence identity thereto.

[0114] In a preferred embodiment, the portion of exon 1 of VAPB comprises or consists of SEQ ID NO: 1 and the allelic variant thereof has at least 85% identity to SEQ ID NO: 1, preferably at least 90% identity, 92%, 94%, 96% or more preferably at least 98% sequence identity thereto. The portion of exon 2 of NRG1 in this fusion preferably comprises or consists of SEQ ID NO: 2 and the allelic variant thereof has at least 85% identity to SEQ ID NO: 2, preferably at least 90% identity, 92%, 94%, 96% or more preferably at least 98% sequence identity thereto. Such short polynucleotide sequences are particularly useful for detecting the presence of a larger polynucleotide fusion between VAPB and NRG1 and establishing that such a fusion is an in-frame, oncogenic fusion comprising an EGF-like domain of NRG1. More preferably, the portion of exon 1 of VAPB comprises or consists of 2 to about 10, about 20, about 30, or up to about 40 or even all contiguous nucleic acids from SEQ ID NO: 1, including at least the nucleic acid of position 43. The number of contiguous nucleic acids may be 2, 3, 4, 5, 6, 7, 8, 9, 10, 11, 12, 13, 14, 15, 16, 17, 18, 19, 20, 21, 22, 23, 24, 25, 26, 27, 28, 29, 30, 31, 32, 33, 34, 35, 36, 37, 38, 39, 40 or all nucleic acids of SEQ ID NO: 1, including at least the nucleic acid of position 43. More preferably, the portion of exon 1 of VAPB comprises or is according to SEQ ID NO: 1, or an allelic variant thereof.

[0115] Alternatively, the portion of exon 1 of VAPB comprises or consists of SEQ ID NO: 17 (or an allelic variant of SEQ ID NO: 17), including at least the nucleic acid of position 399. Preferably, the portion of exon 1 of VAPB comprises or consists of 2 to about 10, about 20, about 30, or up to about 40 or even all contiguous nucleic acids from SEQ ID NO: 17, or from the allelic variant thereof, including at least the nucleic acid of position 399. The number of contiguous nucleic acids may be 2, 3, 4, 5, 6, 7, 8, 9, 10, 11, 12, 13, 14, 15, 16, 17, 18, 19, 20, 21, 22, 23, 24, 25, 26, 27, 28, 29, 30, 31, 32, 33, 34, 35, 36, 37, 38, 39, 40 or all nucleic acids of SEQ ID NO: 17, including at least the nucleic acid of position 399. In this alternative, the portion of exon 1 of VAPB more preferably comprises or is according to SEQ ID NO: 17, or an allelic variant thereof. Preferably, the portion of exon 2 of NRG1 in the fusion with VAPB comprises or consists of 2 to about 10, about 20, about 30, or up to about 40 or even all contiguous nucleic acids from SEQ ID NO: 126, or from the allelic variant thereof, including at least the nucleic acid of position 1. The number of contiguous nucleic acids may be 2, 3, 4, 5, 6, 7, 8, 9, 10, 11, 12, 13, 14, 15, 16, 17, 18, 19, 20, 21, 22, 23, 24, 25, 26, 27, 28, 29, 30, 31, 32, 33, 34, 35, 36, 37, 38, 39, 40 or all nucleic acids of SEQ ID NO: 126, including at least the nucleic acid of position 1.

[0116] In an alternatively preferred embodiment, the polynucleotide comprising a portion of exon 1 of VAPB fused with a portion of exon 2 of NRG1 comprises 2 to about 10, about 20, about 30, or up to about 40 or even all contiguous nucleic acids from SEQ ID NO: 3, including the nucleic acids at positions 43 and 44. The number of contiguous nucleic acids may be 2, 3, 4, 5, 6, 7, 8, 9, 10, 11, 12, 13, 14, 15, 16, 17, 18, 19, 20, 21, 22, 23, 24, 25, 26, 27, 28, 29, 30, 31, 32, 33, 34, 35, 36, 37, 38, 39, 40 or all nucleic acids of SEQ ID NO: 3, including at least the nucleic acids at positions 43 and 44. SEQ ID NO: 3 includes the junction between VAPB and NRG1, in particular the junction is between the nucleic acid at position 43, which stems from VAPB and the nucleic acid at position 44 which stems from NRG1. Preferably, the polynucleotide comprising a portion of exon 1 of VAPB fused with a portion of exon 2 of NRG1 has the polynucleotide sequence of SEQ ID NO: 3, or an allelic variant thereof.

[0117] Preferably, any VAPB-NRG1 polynucleotide fusion provided herein is an in-frame fusion of VAPB with NRG1. More preferably said fusion is an in frame fusion comprising exon 1 of VAPB, or a portion of exon 1, with exon 2 of NRG1, or a portion of exon 2. Said in-frame fusion is preferably the fusion of SEQ ID NO: 3, or an allelic variant thereof.

[0118] Preferably, the portion of exon 1 of VAPB, or the allelic variant thereof, is 5′ to the portion of exon 2 of NRG1, or the allelic variant thereof. This orientation at the nucleic acid level results in a fusion polypeptide product that contains an N-terminus of VAPB and a C-terminus of NRG1. Also, the herein provided VAPB-NRG1 polynucleotide fusion produces a protein fusion, wherein the part from the N-terminus to the fusion junction is polypeptide sequence from VAPB and the part from the junction to the C-terminus is NRG1 polypeptide sequence, wherein the NRG1 part also provides its EGF-like domain. The VAPB-NRG1 fusion protein thereby retains the EGF-like domain of NRG1 and the ability to drive proliferation and survival of a subset of human cancers, including lung cancer or adenocarcinoma, in particular lung adenocarcinoma or non-small cell lung cancer.

### CADM1-NRG1 Polynucleotide Fusion

[0119] There is also provided a polynucleotide fusion comprising a portion of exon 7 of CADM1 fused with a portion of exon 6 of NRG1. Exon 7 of CADM1 is preferably that of SEQ ID NO: 39, or an allelic variant of SEQ ID NO: 39, and exon 6 of NRG1 is preferably that of SEQ ID NO: 130, or an allelic variant of SEQ ID NO: 130.

[0120] Preferably, the allelic variant of exon 7 of CADM1 has at least 85% identity to SEQ ID NO: 39, preferably at least 90% identity, 92%, 94%, 96% or more preferably at least 98% sequence identity thereto and the allelic variant of exon 6 of NRG1 has at least 85% identity to SEQ ID NO: 130, preferably at least 90% identity, 92%, 94%, 96% or more preferably at least 98% sequence identity thereto.

[0121] Preferably, the portion of exon 7 of CADM1 comprises or is according to SEQ ID NO: 5 and the allelic variant thereof has at least 85% identity to SEQ ID NO: 5, preferably at least 90% identity, 92%, 94%, 96% or more preferably at least 98% sequence identity thereto. The portion of exon 6 of NRG1 in the fusion with CADM1 preferably is or comprises the sequence according to SEQ ID NO: 6 and the allelic variant thereof has at least 85% identity to SEQ ID NO: 6, preferably at least 90% identity, 92%, 94%, 96% or more preferably at least 98% sequence identity thereto. Such short polynucleotide sequences are particularly useful for detecting the presence of a larger polynucleotide fusion between CADM1 and NRG1 and establishing that such a fusion is an in-frame, oncogenic fusion comprising an EGF-like domain of NRG1. More preferably, the portion of exon 7 of CADM1 comprises or consists of 2 to about 10, about 20, about 30, or up to about 40 or even all contiguous nucleic acids from SEQ ID NO: 5, including at least the nucleic acid of position 53. The number of contiguous nucleic acids may be 2, 3, 4, 5, 6, 7, 8, 9, 10, 11, 12, 13, 14, 15, 16, 17, 18, 19, 20, 21, 22, 23, 24, 25, 26, 27, 28, 29, 30, 31, 32, 33, 34, 35, 36, 37, 38, 39, 40 or all nucleic acids of SEQ ID NO:5, including at least the nucleic acid of position 53. More preferably, the portion of exon 7 of CADM1 comprises or is according to SEQ ID NO: 5, or an allelic variant thereof.

[0122] Alternatively, the portion of exon 7 of CADM1 comprises or consists of SEQ ID NO: 39 (or an allelic variant of SEQ ID NO: 39), including at least the nucleic acid of position 173. Preferably, the portion of exon 7 of CADM1 comprises or consists of 2 to about 10, about 20, about 30, or up to about 40 or even all contiguous nucleic acids from SEQ ID NO: 39, or from the allelic variant thereof, including at least the nucleic acid of position 173. The number of contiguous nucleic acids may be 2, 3, 4, 5, 6, 7, 8, 9, 10, 11, 12, 13, 14, 15, 16, 17, 18, 19, 20, 21, 22, 23, 24, 25, 26, 27, 28, 29, 30, 31, 32, 33, 34, 35, 36, 37, 38, 39, 40 or all nucleic acids of SEQ ID NO: 39, including at least the nucleic acid of position 173. In this alternative, the portion of exon 7 of CADM1 more preferably comprises or is according to SEQ ID NO: 39, or an allelic variant thereof. Preferably, the portion of exon 6 of NRG1 in the fusion with CADM1 comprises or consists of 2 to about 10, about 20, about 30, or up to about 40 or even all contiguous nucleic acids from SEQ ID NO: 130, or from the allelic variant thereof, including at least the nucleic acid of position 1. The number of contiguous nucleic acids may be 2, 3, 4, 5, 6, 7, 8, 9, 10, 11, 12, 13, 14, 15, 16, 17, 18, 19, 20, 21, 22, 23, 24, 25, 26, 27, 28, 29, 30, 31, 32, 33, 34, 35, 36, 37, 38, 39, 40 or all nucleic acids of SEQ ID NO: 130, including at least the nucleic acid of position 1.

[0123] In an alternatively preferred embodiment, the polynucleotide comprising a portion of exon 7 of CADM1 fused with a portion of exon 6 of NRG1 comprises 2 to about 10, about 20, about 30, or up to about 40 or even all contiguous nucleic acids from SEQ ID NO: 7, including the nucleic acids at positions 53 and 54. The number of contiguous nucleic acids may be 2, 3, 4, 5, 6, 7, 8, 9, 10, 11, 12, 13, 14, 15, 16, 17, 18, 19, 20, 21, 22, 23, 24, 25, 26, 27, 28, 29, 30, 31, 32, 33, 34, 35, 36, 37, 38, 39, 40 or all nucleic acids of SEQ ID NO: 7, including at least the nucleic acids at positions 53 and 54. SEQ ID NO: 7 includes the junction between CADM1 and NRG1, in particular the junction is between the nucleic acid at position 53, which stems from CADM1 and the nucleic acid at position 54 which stems from NRG1. Preferably, the polynucleotide comprising a portion of exon 7 of CADM1 fused with a portion of exon 6 of NRG1 has the polynucleotide sequence of SEQ ID NO: 7, or an allelic variant thereof.

[0124] In a preferred embodiment, there is provided a polynucleotide according to SEQ ID NO: 7, or a polynucleotide which comprises about 20, about 30, about 40 or all contiguous nucleic acids from SEQ ID NO: 7, preferably including the nucleic acids at positions 53 and 54. The number of contiguous nucleic acids may be 18, 19, 20, 21, 22, 23, 24, 25, 26, 27, 28, 29, 30, 31, 32, 33, 34, 35, 36, 37, 38, 39, 40 or all nucleic acids of SEQ ID NO: 7, preferably including at least the nucleic acids at positions 53 and 54.

[0125] Preferably, any CADM1-NRG1 polynucleotide fusion provided herein is an in-frame fusion of CADM1 with NRG1. More preferably said fusion is an in-frame fusion comprising exon 7 of CADM1, or a portion of exon 7, with exon 6 of NRG1, or a portion of exon 6. Said in frame fusion is preferably the fusion of SEQ ID NO: 7, or an allelic variant thereof having at least 85% identity thereto, preferably at least 90%, 92%, 94%, 96% or even 98% identity thereto.

[0126] Preferably, the polynucleotide comprising a portion of exon 7 of CADM1, or an allelic variant thereof, fused with a portion of exon 6 of NRG1, or an allelic variant thereof, is part of a longer polynucleotide that further comprises or encodes an EGF-like domain of NRG1. An aberrant cell comprising the polynucleotide fusion involving CADM1 or expressing the polypeptide fusion, comprises or encodes an EGF-like domain of NRG1. For quick detection, diagnosis or identification purposes, it may suffice to show that the fusion junction between CADM1 and NRG1 is in-frame and occurs at such a position that the resulting fusion product, nucleic acid or protein, comprises an EGF-like domain of NRG1. Said EGF-like domain is preferably the EGF-like domain according to SEQ ID NO: 163, or an allelic variant thereof having at least 85% identity to SEQ ID NO: 163, preferably at least 90% identity, 92%, 94%, 96% or more preferably at least 98% sequence identity thereto.

[0127] Preferably, the portion of exon 7 of CADM1, or the allelic variant thereof, is 5′ to the portion of exon 6 of NRG1, or the allelic variant thereof. This orientation at the nucleic acid level results in a fusion polypeptide product that contains an N-terminus of CADM1 and a C-terminus of NRG1. Also, the herein provided CADM1-NRG1 polynucleotide fusion produces a protein fusion, wherein the part from the N-terminus to the fusion junction is polypeptide sequence from CADM1 and the part from the junction to the C-terminus is NRG1 polypeptide sequence, wherein the NRG1 part also provides its EGF-like domain. The CADM1-NRG1 fusion protein thereby retains the EGF-like domain of NRG1 and the ability to drive proliferation and survival of a subset of human cancers, including lung cancer or adenocarcinoma, in particular lung adenocarcinoma.

[0128] When present in an aberrant cell of a patient or subject, said CADM1-NRG1 polynucleotide fusion preferably further includes any sequence 5′ from exon 7 of CADM1 and any sequence 3′ from exon 6 of NRG1, but to allow detection of the fusion junction using a polynucleotide-based detection assay, it may suffice that at least SEQ ID NOs: 39 and 130 are present. Any sequence 5′ from exon 7 of CADM1 comprises or consists of one or all of SEQ ID NOs: 33-38 (or any allelic variant of SEQ ID NOs: 33-38), and any sequence 3′ of exon 6 of NRG1 comprises or consists of any one or all of SEQ ID NOs: 131-137 (or any allelic variant of SEQ ID NOs: 131-137).

### CD44-NRG1 Polynucleotide Fusion

[0129] There is also provided a polynucleotide fusion comprising a portion of exon 5 of CD44 fused with a portion of exon 2 of NRG1. Exon 5 of CD44 is preferably that of SEQ ID NO: 65, or an allelic variant of SEQ ID NO: 65, and exon 2 of NRG1 is preferably that of SEQ ID NO: 126, or an allelic variant of SEQ ID NO: 126.

[0130] Preferably, the allelic variant of exon 5 of CD44 has at least 85% identity to SEQ ID NO: 65, preferably at least 90% identity, 92%, 94%, 96% or more preferably at least 98% sequence identity thereto and the allelic variant of exon 2 of NRG1 has at least 85% identity to SEQ ID NO: 126, preferably at least 90% identity, 92%, 94%, 96% or more preferably at least 98% sequence identity thereto.

[0131] Preferably, the portion of exon 5 of CD44 comprises or is according to SEQ ID NO: 9 and the allelic variant thereof has at least 85% identity to SEQ ID NO: 9, preferably at least 90% identity, 92%, 94%, 96% or more preferably at least 98% sequence identity thereto. The portion of exon 2 of NRG1 in the fusion with CD44 preferably is or comprises the sequence according to SEQ ID NO: 10 and the allelic variant thereof has at least 85% identity to SEQ ID NO: 10, preferably at least 90% identity, 92%, 94%, 96% or more preferably at least 98% sequence identity thereto. More preferably, the portion of exon 5 of CD44 comprises or consists of 2 to about 10, about 20, about 30, or up to about 40 or even all contiguous nucleic acids from SEQ ID NO: 9, including at least the nucleic acid of position 52. The number of contiguous nucleic acids may be 2, 3, 4, 5, 6, 7, 8, 9, 10, 11, 12, 13, 14, 15, 16, 17, 18, 19, 20, 21, 22, 23, 24, 25, 26, 27, 28, 29, 30, 31, 32, 33, 34, 35, 36, 37, 38, 39, 40 or all nucleic acids of SEQ ID NO: 9, including at least the nucleic acid of position 52. More preferably, the portion of exon 5 of CD44 comprises or is according to SEQ ID NO: 9, or an allelic variant thereof. Such short polynucleotide sequences are particularly useful for detecting the presence of a larger polynucleotide fusion between CD44 and NRG1 and establishing that such a fusion is an in-frame, oncogenic fusion comprising an EGF-like domain of NRG1.

[0132] Alternatively, the portion of exon 5 of CD44 comprises or consists of SEQ ID NO: 65 (or an allelic variant of SEQ ID NO: 65), including at least the nucleic acid of position 231. Preferably, the portion of exon 5 of CD44 comprises or consists of 2 to about 10, about 20, about 30, or up to about 40 or even all contiguous nucleic acids from SEQ ID NO: 65, or from the allelic variant thereof, including at least the nucleic acid of position 231. The number of contiguous nucleic acids may be 2, 3, 4, 5, 6, 7, 8, 9, 10, 11, 12, 13, 14, 15, 16, 17, 18, 19, 20, 21, 22, 23, 24, 25, 26, 27, 28, 29, 30, 31, 32, 33, 34, 35, 36, 37, 38, 39, 40 or all nucleic acids of SEQ ID NO: 65, including at least the nucleic acid of position 231. In this alternative, the portion of exon 5 of CD44 more preferably comprises or is according to SEQ ID NO: 231, or an allelic variant thereof. Preferably, the portion of exon 2 of NRG1 in the fusion with CD44 comprises or consists of 2 to about 10, about 20, about 30, or up to about 40 or even all contiguous nucleic acids from SEQ ID NO: 126, or from the allelic variant thereof, including at least the nucleic acid of position 1. The number of contiguous nucleic acids may be 2, 3, 4, 5, 6, 7, 8, 9, 10, 11, 12, 13, 14, 15, 16, 17, 18, 19, 20, 21, 22, 23, 24, 25, 26, 27, 28, 29, 30, 31, 32, 33, 34, 35, 36, 37, 38, 39, 40 or all nucleic acids of SEQ ID NO: 126, including at least the nucleic acid of position 1.

[0133] In an alternatively preferred embodiment, the polynucleotide comprising a portion of exon 5 of CD44 fused with a portion of exon 2 of NRG1 comprises 2 to about 10, about 20, about 30, or up to about 40 or even all contiguous nucleic acids from SEQ ID NO: 11, including the nucleic acids at positions 52 and 53. The number of contiguous nucleic acids may be 2, 3, 4, 5, 6, 7, 8, 9, 10, 11, 12, 13, 14, 15, 16, 17, 18, 19, 20, 21, 22, 23, 24, 25, 26, 27, 28, 29, 30, 31, 32, 33, 34, 35, 36, 37, 38, 39, 40 or all nucleic acids of SEQ ID NO: 11, including at least the nucleic acids at positions 52 and 53. SEQ ID NO: 11 includes the junction between CD44 and NRG1, in particular the junction is between the nucleic acid at position 52, which stems from CD44 and the nucleic acid at position 53 which stems from NRG1. Preferably, the polynucleotide comprising a portion of exon 5 of CD44 fused with a portion of exon 2 of NRG1 has the polynucleotide sequence of SEQ ID NO: 15, or an allelic variant thereof.

[0134] In a preferred embodiment, there is provided a polynucleotide according to SEQ ID NO: 11, or a polynucleotide which comprises about 20, about 30, about 40 or all contiguous nucleic acids from SEQ ID NO: 11, preferably including the nucleic acids at positions 52 and 53. The number of contiguous nucleic acids may be 18, 19, 20, 21, 22, 23, 24, 25, 26, 27, 28, 29, 30, 31, 32, 33, 34, 35, 36, 37, 38, 39, 40 or all nucleic acids of SEQ ID NO: 11, preferably including at least the nucleic acids at positions 52 and 53.

[0135] Preferably, any CD44-NRG1 polynucleotide fusion provided herein is an in-frame fusion of CD44 with NRG1. More preferably said fusion is an in-frame fusion comprising exon 5 of CD44 (or a portion of exon 5) with exon 2 of NRG1 (or a portion of exon 2 of NRG1). Said in-frame fusion is preferably the fusion of SEQ ID NO: 11, or an allelic variant thereof having at least 85% identity thereto, preferably at least 90%, 92%, 94%, 96% or even 98% identity thereto.

[0136] Preferably, the polynucleotide comprising a portion of exon 5 of CD44, or an allelic variant thereof, fused with a portion of exon 2 of NRG1, or an allelic variant thereof, is part of a longer polynucleotide that further comprises or encodes an EGF-like domain of NRG1. An aberrant cell comprising the polynucleotide fusion involving CD44 or expressing the polypeptide fusion, comprises or encodes an EGF-like domain of NRG1. For quick detection, diagnosis or identification purposes, it may suffice to show that the fusion junction between CD44 and NRG1 is in-frame and occurs at such a position that the resulting fusion product, nucleic acid or protein, comprises an EGF-like domain of NRG1. Said EGF-like domain is preferably the EGF-like domain according to SEQ ID NO: 163, or an allelic variant thereof having at least 85% identity to SEQ ID NO: 163, preferably at least 90% identity, 92%, 94%, 96% or more preferably at least 98% sequence identity thereto.

[0137] Preferably, the portion of exon 5 of CD44, or the allelic variant thereof, is 5′ to the portion of exon 2 of NRG1, or the allelic variant thereof. This orientation at the nucleic acid level results in a fusion polypeptide product that contains an N-terminus of CD44 and a C-terminus of NRG1. Also, the herein provided CD44-NRG1 polynucleotide fusion produces a protein fusion, wherein the part from the N-terminus to the fusion junction is polypeptide sequence from CD44 and the part from the junction to the C-terminus is NRG1 polypeptide sequence, wherein the NRG1 part also provides its EGF-like domain. The CD44-NRG1 fusion protein thereby retains the EGF-like domain of NRG1 and the ability to drive proliferation and survival of a subset of human cancers, including pancreatic cancer or pancreatic adenocarcinoma, in particular pancreatic ductal adenocarcinoma (or PDAC).

[0138] When present in an aberrant cell of a patient or subject, said CD44-NRG1 polynucleotide fusion preferably further includes any sequence 5′ from exon 5 of CD44 and any sequence 3′ from exon 2 of NRG1, but to allow detection of the fusion junction using a polynucleotide-based detection assay, it may suffice that at least SEQ ID NOs: 65 and 126 are present. Any sequence 5′ from exon 5 of CD44 comprises or consists of one or all of SEQ ID NOs: 61-64 (or any allelic variant of SEQ ID NOs: 61-64), and any sequence 3′ of exon 2 of NRG1 comprises or consists of one or all of SEQ ID NOs: 127-137 (or any allelic variant of SEQ ID NOs 127-137).

[0139] Further, there is provided a polynucleotide fusion comprising a portion of Exon 5 of CD44 fused with a portion of exon 6 of NRG1. Exon 5 of said CD44 is preferably that of SEQ ID NO: 65, or an allelic variant of SEQ ID NO: 65, and exon 6 of NRG1 is preferably that of SEQ ID NO: 130, or an allelic variant of SEQ ID NO: 130.

[0140] Preferably, the allelic variant of Exon 5 of said CD44 has at least 85% identity to SEQ ID NO: 65, preferably at least 90% identity, 92%, 94%, 96% or more preferably at least 98% sequence identity thereto and the allelic variant of exon 6 of NRG1 has at least 85% identity to SEQ ID NO: 130, preferably at least 90% identity, 92%, 94%, 96% or more preferably at least 98% sequence identity thereto.

[0141] Preferably, the portion of Exon 5 of said CD44 comprises or is according to SEQ ID NO: 759 and the allelic variant thereof has at least 85% identity to SEQ ID NO: 759, preferably at least 90% identity, 92%, 94%, 96% or more preferably at least 98% sequence identity thereto. The portion of exon 6 of NRG1 in the fusion with CD44 preferably is or comprises the sequence according to SEQ ID NO: 760 and the allelic variant thereof has at least 85% identity to SEQ ID NO: 760, preferably at least 90% identity, 92%, 94%, 96% or more preferably at least 98% sequence identity thereto. More preferably, the portion of Exon 5 of CD44 comprises or consists of 2 to about 10, about 20, about 30, or up to about 40 or even all contiguous nucleic acids from SEQ ID NO: 759, including at least the nucleic acid of position 75. The number of contiguous nucleic acids may be 2, 3, 4, 5, 6, 7, 8, 9, 10, 11, 12, 13, 14, 15, 16, 17, 18, 19, 20, 21, 22, 23, 24, 25, 26, 27, 28, 29, 30, 31, 32, 33, 34, 35, 36, 37, 38, 39, 40 or all nucleic acids of SEQ ID NO: 759, including at least the nucleic acid of position 75. More preferably, the portion of Exon 5 of said CD44 comprises or is according to SEQ ID NO: 759, or an allelic variant thereof. Such short polynucleotide sequences are particularly useful for detecting the presence of a larger polynucleotide fusion between said CD44 and NRG1 and establishing that such a fusion is an in frame, oncogenic fusion comprising an EGF-like domain of NRG1.

[0142] Alternatively, the portion of Exon 5 of said CD44 comprises or consists of SEQ ID NO: 65 (or an allelic variant of SEQ ID NO: 65), including at least the nucleic acid of position 231. Preferably, the portion of Exon 5 of said CD44 comprises or consists of 2 to about 10, about 20, about 30, or up to about 40 or even all contiguous nucleic acids from SEQ ID NO: 65, or from the allelic variant thereof, including at least the nucleic acid of position 231. The number of contiguous nucleic acids may be 2, 3, 4, 5, 6, 7, 8, 9, 10, 11, 12, 13, 14, 15, 16, 17, 18, 19, 20, 21, 22, 23, 24, 25, 26, 27, 28, 29, 30, 31, 32, 33, 34, 35, 36, 37, 38, 39, 40 or all nucleic acids of SEQ ID NO: 65, including at least the nucleic acid of position 231. In this alternative, the portion of Exon 5 of CD44 more preferably comprises or is according to SEQ ID NO: 65, or an allelic variant thereof. Preferably, the portion of exon 6 of NRG1 in the fusion with of CD44 comprises or consists of 2 to about 10, about 20, about 30, or up to about 40 or even all contiguous nucleic acids from SEQ ID NO: 130, or from the allelic variant thereof, including at least the nucleic acid of position 1. The number of contiguous nucleic acids may be 2, 3, 4, 5, 6, 7, 8, 9, 10, 11, 12, 13, 14, 15, 16, 17, 18, 19, 20, 21, 22, 23, 24, 25, 26, 27, 28, 29, 30, 31, 32, 33, 34, 35, 36, 37, 38, 39, 40 or all nucleic acids of SEQ ID NO: 130, including at least the nucleic acid of position 1.

[0143] Preferably, any CD44-NRG1 polynucleotide fusion provided herein is an in-frame fusion of CD44 with NRG1. More preferably said fusion is an in-frame fusion comprising Exon 5 of CD44, or a portion of Exon 5, with exon 6 of NRG1, or a portion of exon 6 of NRG1. Said in-frame fusion is preferably the fusion of SEQ ID NO: 761, or an allelic variant thereof having at least 85% identity thereto, preferably at least 90%, 92%, 94%, 96% or even 98% identity thereto.

[0144] In an alternatively preferred embodiment, the polynucleotide comprising a portion of Exon 5 of said CD44 fused with a portion of exon 6 of NRG1 comprises 2 to about 10, about 20, about 30, or up to about 40 or even all contiguous nucleic acids from SEQ ID NO: 761, including the nucleic acids at positions 75 and 76. The number of contiguous nucleic acids may be 2, 3, 4, 5, 6, 7, 8, 9, 10, 11, 12, 13, 14, 15, 16, 17, 18, 19, 20, 21, 22, 23, 24, 25, 26, 27, 28, 29, 30, 31, 32, 33, 34, 35, 36, 37, 38, 39, 40 or all nucleic acids of SEQ ID NO: 761, including at least the nucleic acids at positions 75 and 76. SEQ ID NO: 761 includes the junction between said CD44 and NRG1, in particular the junction is between the nucleic acid at position 75, which stems from CD44 and the nucleic acid at position 76 which stems from NRG1. Preferably, the polynucleotide comprising a portion of Exon 5 of CD44 fused with a portion of exon 6 of NRG1 has the polynucleotide sequence of SEQ ID NO: 761, or an allelic variant thereof.

[0145] In a preferred embodiment, there is provided a polynucleotide according to SEQ ID NO: 761, or a polynucleotide which comprises about 20, about 30, about 40 or all contiguous nucleic acids from SEQ ID NO: 761, preferably including the nucleic acids at positions 75 and 76. The number of contiguous nucleic acids may be 18, 19, 20, 21, 22, 23, 24, 25, 26, 27, 28, 29, 30, 31, 32, 33, 34, 35, 36, 37, 38, 39, 40 or all nucleic acids of SEQ ID NO: 761, preferably including at least the nucleic acids at positions 75 and 76.

[0146] Preferably, the polynucleotide comprising a portion of Exon 5 of CD44, or an allelic variant thereof, fused with a portion of exon 6 of NRG1, or an allelic variant thereof, is part of a longer polynucleotide that further comprises or encodes an EGF-like domain of NRG1. An aberrant cell comprising the polynucleotide fusion involving said CD44 or expressing the polypeptide fusion, comprises or encodes an EGF-like domain of NRG1. For quick detection, diagnosis or identification purposes, it may suffice to show that the fusion junction between said CD44 and NRG1 is in-frame and occurs at such a position that the resulting fusion product, nucleic acid or protein, comprises an EGF-like domain of NRG1. Said EGF-like domain is preferably the EGF-like domain according to SEQ ID NO: 163, or an allelic variant thereof having at least 85% identity to SEQ ID NO: 163, preferably at least 90% identity, 92%, 94%, 96% or more preferably at least 98% sequence identity thereto.

[0147] Preferably, the portion of Exon 5 of CD44, or the allelic variant thereof, is 5′ to the portion of exon 6 of NRG1, or the allelic variant thereof. This orientation at the nucleic acid level results in a fusion polypeptide product that contains an N-terminus of CD44 and a C-terminus of NRG1. Also, the herein provided CD44-NRG1 polynucleotide fusion produces a protein fusion, wherein the part from the N-terminus to the fusion junction is polypeptide sequence from CD44 and the part from the junction to the C-terminus is NRG1 polypeptide sequence, wherein the NRG1 part also provides its EGF-like domain. The CD44-NRG1 fusion protein thereby retains the EGF-like domain of NRG1 and the ability to drive proliferation and survival of a subset of human cancers, in particular a pancreatic cancer.

[0148] When present in an aberrant cell of a patient or subject, said polynucleotide fusion preferably further includes any sequence 5′ from Exon 5 of CD44 and any sequence 3′ from exon 6 of NRG1, but to allow detection of the fusion junction using a polynucleotide-based detection assay, it may suffice that at least SEQ ID NOs: 65 and 130 are present. Any sequence 5′ from Exon 5 of CD44 comprises or consists of one or all of SEQ ID NOs: 61-64 (or any allelic variant of SEQ ID NOs: 61-64), and any sequence 3′ of exon 6 of NRG1 comprises or consists of one or all of SEQ ID NOs: 131-137 (or any allelic variant of SEQ ID NOs: 131-137).

### SLC3A2-NRG1 Polynucleotide Fusion

[0149] There is also provided a polynucleotide fusion comprising a portion of exon 1 of transcript version 6 SLC3A2 fused with a portion of exon 5 of NRG1. Exon 1 of said SLC3A2 is preferably that of SEQ ID NO: 103, or an allelic variant of SEQ ID NO: 103, and exon 5 of NRG1 is preferably that of SEQ ID NO: 129, or an allelic variant of SEQ ID NO: 129.

[0150] Preferably, the allelic variant of exon 1 of said SLC3A2 has at least 85% identity to SEQ ID NO: 103, preferably at least 90% identity, 92%, 94%, 96% or more preferably at least 98% sequence identity thereto and the allelic variant of exon 5 of NRG1 has at least 85% identity to SEQ ID NO: 129, preferably at least 90% identity, 92%, 94%, 96% or more preferably at least 98% sequence identity thereto.

[0151] Preferably, the portion of exon 1 of said SLC3A2 comprises or is according to SEQ ID NO: 13 and the allelic variant thereof has at least 85% identity to SEQ ID NO: 13, preferably at least 90% identity, 92%, 94%, 96% or more preferably at least 98% sequence identity thereto. The portion of exon 5 of NRG1 in the fusion with SLC3A2 preferably is or comprises the sequence according to SEQ ID NO: 14 and the allelic variant thereof has at least 85% identity to SEQ ID NO: 14, preferably at least 90% identity, 92%, 94%, 96% or more preferably at least 98% sequence identity thereto. More preferably, the portion of exon 1 of SLC3A2 comprises or consists of 2 to about 10, about 20, about 30, or up to about 40 or even all contiguous nucleic acids from SEQ ID NO: 13, including at least the nucleic acid of position 53. The number of contiguous nucleic acids may be 2, 3, 4, 5, 6, 7, 8, 9, 10, 11, 12, 13, 14, 15, 16, 17, 18, 19, 20, 21, 22, 23, 24, 25, 26, 27, 28, 29, 30, 31, 32, 33, 34, 35, 36, 37, 38, 39, 40 or all nucleic acids of SEQ ID NO: 13, including at least the nucleic acid of position 53. More preferably, the portion of exon 1 of said SLC3A2 comprises or is according to SEQ ID NO: 13, or an allelic variant thereof. Such short polynucleotide sequences are particularly useful for detecting the presence of a larger polynucleotide fusion between said SLC3A2 and NRG1 and establishing that such a fusion is an in frame, oncogenic fusion comprising an EGF-like domain of NRG1.

[0152] Alternatively, the portion of exon 1 of said SLC3A2 comprises or consists of SEQ ID NO: 103 (or an allelic variant of SEQ ID NO: 103), including at least the nucleic acid of position 552. Preferably, the portion of exon 1 of said SLC3A2 comprises or consists of 2 to about 10, about 20, about 30, or up to about 40 or even all contiguous nucleic acids from SEQ ID NO: 103, or from the allelic variant thereof, including at least the nucleic acid of position 552. The number of contiguous nucleic acids may be 2, 3, 4, 5, 6, 7, 8, 9, 10, 11, 12, 13, 14, 15, 16, 17, 18, 19, 20, 21, 22, 23, 24, 25, 26, 27, 28, 29, 30, 31, 32, 33, 34, 35, 36, 37, 38, 39, 40 or all nucleic acids of SEQ ID NO: 103, including at least the nucleic acid of position 552. In this alternative, the portion of exon 1 of SLC3A2 more preferably comprises or is according to SEQ ID NO: 103, or an allelic variant thereof. Preferably, the portion of exon 5 of NRG1 in the fusion with said SLC3A2 comprises or consists of 2 to about 10, about 20, about 30, or up to about 40 or even all contiguous nucleic acids from SEQ ID NO: 157, or from the allelic variant thereof, including at least the nucleic acid of position 1. The number of contiguous nucleic acids may be 2, 3, 4, 5, 6, 7, 8, 9, 10, 11, 12, 13, 14, 15, 16, 17, 18, 19, 20, 21, 22, 23, 24, 25, 26, 27, 28, 29, 30, 31, 32, 33, 34, 35, 36, 37, 38, 39, 40 or all nucleic acids of SEQ ID NO: 157, including at least the nucleic acid of position 1.

[0153] Preferably, any SLC3A2-NRG1 polynucleotide fusion provided herein is an in-frame fusion of SLC3A2 with NRG1. More preferably said fusion is an in-frame fusion comprising exon 1 of transcript version 6 of SLC3A2, or a portion of exon 1, with exon 5 of NRG1, or a portion of exon 5 of NRG1. Said in frame fusion is preferably the fusion of SEQ ID NO: 15, or an allelic variant thereof having at least 85% identity thereto, preferably at least 90%, 92%, 94%, 96% or even 98% identity thereto.

[0154] In an alternatively preferred embodiment, the polynucleotide comprising a portion of exon 1 of said SLC3A2 fused with a portion of exon 5 of NRG1 comprises 2 to about 10, about 20, about 30, or up to about 40 or even all contiguous nucleic acids from SEQ ID NO: 15, including the nucleic acids at positions 53 and 54. The number of contiguous nucleic acids may be 2, 3, 4, 5, 6, 7, 8, 9, 10, 11, 12, 13, 14, 15, 16, 17, 18, 19, 20, 21, 22, 23, 24, 25, 26, 27, 28, 29, 30, 31, 32, 33, 34, 35, 36, 37, 38, 39, 40 or all nucleic acids of SEQ ID NO: 15, including at least the nucleic acids at positions 53 and 54. SEQ ID NO: 15 includes the junction between said SLC3A2 and NRG1, in particular the junction is between the nucleic acid at position 53, which stems from SLC3A2 and the nucleic acid at position 54 which stems from NRG1. Preferably, the polynucleotide comprising a portion of exon 1 of SLC3A2 fused with a portion of exon 5 of NRG1 has the polynucleotide sequence of SEQ ID NO: 15, or an allelic variant thereof.

[0155] In a preferred embodiment, there is provided a polynucleotide according to SEQ ID NO: 15, or a polynucleotide which comprises about 20, about 30, about 40 or all contiguous nucleic acids from SEQ ID NO: 15, preferably including the nucleic acids at positions 53 and 54. The number of contiguous nucleic acids may be 18, 19, 20, 21, 22, 23, 24, 25, 26, 27, 28, 29, 30, 31, 32, 33, 34, 35, 36, 37, 38, 39, 40 or all nucleic acids of SEQ ID NO:15, preferably including at least the nucleic acids at positions 53 and 54.

[0156] Preferably, the polynucleotide comprising a portion of exon 1 of transcript version 6 of SLC3A2, or an allelic variant thereof, fused with a portion of exon 5 of NRG1, or an allelic variant thereof, is part of a longer polynucleotide that further comprises or encodes an EGF-like domain of NRG1. An aberrant cell comprising the polynucleotide fusion involving said SLC3A2 or expressing the polypeptide fusion, comprises or encodes an EGF-like domain of NRG1. For quick detection, diagnosis or identification purposes, it may suffice to show that the fusion junction between said SLC3A2 and NRG1 is in-frame and occurs at such a position that the resulting fusion product, nucleic acid or protein, comprises an EGF-like domain of NRG1. Said EGF-like domain is preferably the EGF-like domain according to SEQ ID NO: 163, or an allelic variant thereof having at least 85% identity to SEQ ID NO: 163, preferably at least 90% identity, 92%, 94%, 96% or more preferably at least 98% sequence identity thereto.

[0157] Preferably, the portion of exon 1 of transcript version 6 of SLC3A2, or the allelic variant thereof, is 5′ to the portion of exon 5 of NRG1, or the allelic variant thereof. This orientation at the nucleic acid level results in a fusion polypeptide product that contains an N-terminus of SLC3A2 and a C-terminus of NRG1. Also, the herein provided SLC3A2-NRG1 polynucleotide fusion produces a protein fusion, wherein the part from the N-terminus to the fusion junction is polypeptide sequence from SLC3A2 and the part from the junction to the C-terminus is NRG1 polypeptide sequence, wherein the NRG1 part also provides its EGF-like domain. The SLC3A2-NRG1 fusion protein thereby retains the EGF-like domain of NRG1 and the ability to drive proliferation and survival of a subset of human cancers, including lung cancer or adenocarcinoma, in particular lung adenocarcinoma.

[0158] When present in an aberrant cell of a patient or subject, said SCL3A2-NRG1 polynucleotide fusion preferably further includes any sequence 3′ from exon 5 of NRG1, but to allow detection of the fusion junction using a polynucleotide-based detection assay, it may suffice that at least SEQ ID NOs: 103 and 129 are present. Any sequence 3′ of exon 5 of NRG1 comprises or consists of one or all of SEQ ID NOs: 130-137 (or any allelic variant of SEQ ID NOs: 130-137).

[0159] Further, there is provided a polynucleotide fusion comprising a portion of exon 2 of transcript version 3 SLC3A2 fused with a portion of exon 6 of NRG1. Exon 2 of said SLC3A2 is preferably that of SEQ ID NO: 457, or an allelic variant of SEQ ID NO: 457, and exon 6 of NRG1 is preferably that of SEQ ID NO: 130, or an allelic variant of SEQ ID NO: 130.

[0160] Preferably, the allelic variant of exon 2 of said SLC3A2 has at least 85% identity to SEQ ID NO: 457, preferably at least 90% identity, 92%, 94%, 96% or more preferably at least 98% sequence identity thereto and the allelic variant of exon 6 of NRG1 has at least 85% identity to SEQ ID NO: 130, preferably at least 90% identity, 92%, 94%, 96% or more preferably at least 98% sequence identity thereto.

[0161] Preferably, the portion of exon 2 of said SLC3A2 comprises or is according to SEQ ID NO: 452 and the allelic variant thereof has at least 85% identity to SEQ ID NO: 452, preferably at least 90% identity, 92%, 94%, 96% or more preferably at least 98% sequence identity thereto. The portion of exon 6 of NRG1 in the fusion with SLC3A2 preferably is or comprises the sequence according to SEQ ID NO: 453 and the allelic variant thereof has at least 85% identity to SEQ ID NO: 453, preferably at least 90% identity, 92%, 94%, 96% or more preferably at least 98% sequence identity thereto. More preferably, the portion of exon 2 of SLC3A2 comprises or consists of 2 to about 10, about 20, about 30, or up to about 40 or even all contiguous nucleic acids from SEQ ID NO: 452, including at least the nucleic acid of position 93. The number of contiguous nucleic acids may be 2, 3, 4, 5, 6, 7, 8, 9, 10, 11, 12, 13, 14, 15, 16, 17, 18, 19, 20, 21, 22, 23, 24, 25, 26, 27, 28, 29, 30, 31, 32, 33, 34, 35, 36, 37, 38, 39, 40 or all nucleic acids of SEQ ID NO: 452, including at least the nucleic acid of position 93. More preferably, the portion of exon 2 of said SLC3A2 comprises or is according to SEQ ID NO: 452, or an allelic variant thereof. Such short polynucleotide sequences are particularly useful for detecting the presence of a larger polynucleotide fusion between said SLC3A2 and NRG1 and establishing that such a fusion is an in-frame, oncogenic fusion comprising an EGF-like domain of NRG1.

[0162] Alternatively, the portion of exon 2 of said SLC3A2 comprises or consists of SEQ ID NO: 457 (or an allelic variant of SEQ ID NO: 457), including at least the nucleic acid of position 93. Preferably, the portion of exon 2 of said SLC3A2 comprises or consists of 2 to about 10, about 20, about 30, or up to about 40 or even all contiguous nucleic acids from SEQ ID NO: 457, or from the allelic variant thereof, including at least the nucleic acid of position 93. The number of contiguous nucleic acids may be 2, 3, 4, 5, 6, 7, 8, 9, 10, 11, 12, 13, 14, 15, 16, 17, 18, 19, 20, 21, 22, 23, 24, 25, 26, 27, 28, 29, 30, 31, 32, 33, 34, 35, 36, 37, 38, 39, 40 or all nucleic acids of SEQ ID NO: 457, including at least the nucleic acid of position 93. In this alternative, the portion of exon 2 of SLC3A2 more preferably comprises or is according to SEQ ID NO: 457, or an allelic variant thereof. Preferably, the portion of exon 6 of NRG1 in the fusion with transcript version 3 of SLC3A2 comprises or consists of 2 to about 10, about 20, about 30, or up to about 40 or even all contiguous nucleic acids from SEQ ID NO: 130, or from the allelic variant thereof, including at least the nucleic acid of position 1. The number of contiguous nucleic acids may be 2, 3, 4, 5, 6, 7, 8, 9, 10, 11, 12, 13, 14, 15, 16, 17, 18, 19, 20, 21, 22, 23, 24, 25, 26, 27, 28, 29, 30, 31, 32, 33, 34, 35, 36, 37, 38, 39, 40 or all nucleic acids of SEQ ID NO: 130, including at least the nucleic acid of position 1.

[0163] Preferably, any SLC3A2-NRG1 polynucleotide fusion provided herein is an in-frame fusion of SLC3A2 with NRG1. More preferably said fusion is an in-frame fusion comprising exon 2 of transcript version 3 of SLC3A2, or a portion of exon 2, with exon 6 of NRG1, or a portion of exon 6 of NRG1. Said in-frame fusion is preferably the fusion of SEQ ID NO: 454, or an allelic variant thereof having at least 85% identity thereto, preferably at least 90%, 92%, 94%, 96% or even 98% identity thereto.

[0164] In an alternatively preferred embodiment, the polynucleotide comprising a portion of exon 2 of said SLC3A2 fused with a portion of exon 6 of NRG1 comprises 2 to about 10, about 20, about 30, or up to about 40 or even all contiguous nucleic acids from SEQ ID NO: 454, including the nucleic acids at positions 93 and 94. The number of contiguous nucleic acids may be 2, 3, 4, 5, 6, 7, 8, 9, 10, 11, 12, 13, 14, 15, 16, 17, 18, 19, 20, 21, 22, 23, 24, 25, 26, 27, 28, 29, 30, 31, 32, 33, 34, 35, 36, 37, 38, 39, 40 or all nucleic acids of SEQ ID NO: 454, including at least the nucleic acids at positions 93 and 94. SEQ ID NO: 454 includes the junction between said SLC3A2 and NRG1, in particular the junction is between the nucleic acid at position 93, which stems from SLC3A2 and the nucleic acid at position 94 which stems from NRG1. Preferably, the polynucleotide comprising a portion of exon 2 of SLC3A2 fused with a portion of exon 6 of NRG1 has the polynucleotide sequence of SEQ ID NO: 454, or an allelic variant thereof.

[0165] In a preferred embodiment, there is provided a polynucleotide according to SEQ ID NO: 454, or a polynucleotide which comprises about 20, about 30, about 40 or all contiguous nucleic acids from SEQ ID NO: 454, preferably including the nucleic acids at positions 93 and 94. The number of contiguous nucleic acids may be 18, 19, 20, 21, 22, 23, 24, 25, 26, 27, 28, 29, 30, 31, 32, 33, 34, 35, 36, 37, 38, 39, 40 or all nucleic acids of SEQ ID NO: 454, preferably including at least the nucleic acids at positions 93 and 94.

[0166] Preferably, the polynucleotide comprising a portion of exon 2 of transcript version 3 of SLC3A2, or an allelic variant thereof, fused with a portion of exon 6 of NRG1, or an allelic variant thereof, is part of a longer polynucleotide that further comprises or encodes an EGF-like domain of NRG1. An aberrant cell comprising the polynucleotide fusion involving said SLC3A2 or expressing the polypeptide fusion, comprises or encodes an EGF-like domain of NRG1. For quick detection, diagnosis or identification purposes, it may suffice to show that the fusion junction between said SLC3A2 and NRG1 is in-frame and occurs at such a position that the resulting fusion product, nucleic acid or protein, comprises an EGF-like domain of NRG1. Said EGF-like domain is preferably the EGF-like domain according to SEQ ID NO: 163, or an allelic variant thereof having at least 85% identity to SEQ ID NO: 163, preferably at least 90% identity, 92%, 94%, 96% or more preferably at least 98% sequence identity thereto.

[0167] Preferably, the portion of exon 2 of transcript version 3 of SLC3A2, or the allelic variant thereof, is 5′ to the portion of exon 6 of NRG1, or the allelic variant thereof. This orientation at the nucleic acid level results in a fusion polypeptide product that contains an N-terminus of SLC3A2 and a C-terminus of NRG1. Also, the herein provided SLC3A2-NRG1 polynucleotide fusion produces a protein fusion, wherein the part from the N-terminus to the fusion junction is polypeptide sequence from SLC3A2 and the part from the junction to the C-terminus is NRG1 polypeptide sequence, wherein the NRG1 part also provides its EGF-like domain. The SLC3A2-NRG1 fusion protein thereby retains the EGF-like domain of NRG1 and the ability to drive proliferation and survival of a subset of human cancers, including lung cancer or adenocarcinoma, in particular lung adenocarcinoma.

[0168] When present in an aberrant cell of a patient or subject, said SCL3A2-NRG1 polynucleotide fusion preferably further includes any sequence 3′ from exon 6 of NRG1, but to allow detection of the fusion junction using a polynucleotide-based detection assay, it may suffice that at least SEQ ID NOs: 457 and 130 are present. Any sequence 3′ of exon 6 of NRG1 comprises or consists of one or all of SEQ ID NOs: 131-137 (or any allelic variant of SEQ ID NOs: 131-137).

### VTCN1-NRG1 Polynucleotide Fusion

[0169] There is also provided a polynucleotide fusion comprising a portion of exon 2 of VTCN1 fused with a portion of exon 2 of NRG1. Exon 2 of VTCN1 is preferably that of SEQ ID NO: 169, or an allelic variant of SEQ ID NO: 169, and exon 2 of NRG1 is preferably that of SEQ ID NO: 126, or an allelic variant of SEQ ID NO: 126.

[0170] Preferably, the allelic variant of exon 2 of VTCN1 has at least 85% identity to SEQ ID NO: 169, preferably at least 90% identity, 92%, 94%, 96% or more preferably at least 98% sequence identity thereto and the allelic variant of exon 2 of NRG1 has at least 85% identity to SEQ ID NO: 126, preferably at least 90% identity, 92%, 94%, 96% or more preferably at least 98% sequence identity thereto.

[0171] Preferably, the portion of exon 2 of VTCN1 comprises or is according to SEQ ID NO: 164 and the allelic variant thereof has at least 85% identity to SEQ ID NO: 164, preferably at least 90% identity, 92%, 94%, 96% or more preferably at least 98% sequence identity thereto. The portion of exon 2 of NRG1 in the fusion with VTCN1 preferably is or comprises the sequence according to SEQ ID NO: 165 and the allelic variant thereof has at least 85% identity to SEQ ID NO: 165, preferably at least 90% identity, 92%, 94%, 96% or more preferably at least 98% sequence identity thereto. More preferably, the portion of exon 2 of VTCN1 comprises or consists of 2 to about 10, about 20, about 30, or up to about 40 or even all contiguous nucleic acids from SEQ ID NO: 164, including at least the nucleic acid of position 65. The number of contiguous nucleic acids may be 2, 3, 4, 5, 6, 7, 8, 9, 10, 11, 12, 13, 14, 15, 16, 17, 18, 19, 20, 21, 22, 23, 24, 25, 26, 27, 28, 29, 30, 31, 32, 33, 34, 35, 36, 37, 38, 39, 40 or all nucleic acids of SEQ ID NO: 164, including at least the nucleic acid of position 65. More preferably, the portion of exon 2 of VTCN1 comprises or is according to SEQ ID NO: 164, or an allelic variant thereof. Such short polynucleotide sequences are particularly useful for detecting the presence of a larger polynucleotide fusion between VTCN1 and NRG1 and establishing that such a fusion is an in-frame, oncogenic fusion comprising an EGF-like domain of NRG1.

[0172] Preferably, any VTCN1-NRG1 polynucleotide fusion provided herein is an in-frame fusion of VTCN1 with NRG1. More preferably said fusion is an in-frame fusion comprising exon 2 of VTCN1, or a portion of exon 2, with exon 2 of NRG1, or a portion of exon 2 of NRG1. Said in-frame fusion is preferably the fusion of SEQ ID NO: 166, or an allelic variant thereof having at least 85% identity thereto, preferably at least 90%, 92%, 94%, 96% or even 98% identity thereto.

[0173] In an alternatively preferred embodiment, the polynucleotide comprising a portion of exon 2 of VTCN1 fused with a portion of exon 2 of NRG1 comprises 2 to about 10, about 20, about 30, or up to about 40 or even all contiguous nucleic acids from SEQ ID NO: 166, including the nucleic acids at positions 65 and 66. The number of contiguous nucleic acids may be 2, 3, 4, 5, 6, 7, 8, 9, 10, 11, 12, 13, 14, 15, 16, 17, 18, 19, 20, 21, 22, 23, 24, 25, 26, 27, 28, 29, 30, 31, 32, 33, 34, 35, 36, 37, 38, 39, 40 or all nucleic acids of SEQ ID NO: 166, including at least the nucleic acids at positions 65 and 66. SEQ ID NO: 166 includes the junction between VTCN1 and NRG1, in particular the junction is between the nucleic acid at position 65, which stems from VTCN1 and the nucleic acid at position 66 which stems from NRG1. Preferably, the polynucleotide comprising a portion of exon 2 of VTCN1 fused with a portion of exon 2 of NRG1 has the polynucleotide sequence of SEQ ID NO: 166, or an allelic variant thereof. Preferably, the portion of exon 2 of NRG1 in the fusion with VTCN1 comprises or consists of 2 to about 10, about 20, about 30, or up to about 40 or even all contiguous nucleic acids from SEQ ID NO: 126, or from the allelic variant thereof, including at least the nucleic acid of position 1. The number of contiguous nucleic acids may be 2, 3, 4, 5, 6, 7, 8, 9, 10, 11, 12, 13, 14, 15, 16, 17, 18, 19, 20, 21, 22, 23, 24, 25, 26, 27, 28, 29, 30, 31, 32, 33, 34, 35, 36, 37, 38, 39, 40 or all nucleic acids of SEQ ID NO: 126, including at least the nucleic acid of position 1.

[0174] In a preferred embodiment, there is provided a polynucleotide according to SEQ ID NO: 166, or a polynucleotide which comprises about 20, about 30, about 40 or all contiguous nucleic acids from SEQ ID NO: 166, preferably including the nucleic acids at positions 65 and 66. The number of contiguous nucleic acids may be 18, 19, 20, 21, 22, 23, 24, 25, 26, 27, 28, 29, 30, 31, 32, 33, 34, 35, 36, 37, 38, 39, 40 or all nucleic acids of SEQ ID NO: 166, preferably including at least the nucleic acids at positions 65 and 66.

[0175] Preferably, the polynucleotide comprising a portion of exon 2 of VTCN1, or an allelic variant thereof, fused with a portion of exon 2 of NRG1, or an allelic variant thereof, is part of a longer polynucleotide that further comprises or encodes an EGF-like domain of NRG1. An aberrant cell comprising the polynucleotide fusion involving VTCN1 or expressing the polypeptide fusion, comprises or encodes an EGF-like domain of NRG1. For quick detection, diagnosis or identification purposes, it may suffice to show that the fusion junction between VTCN1 and NRG1 is in-frame and occurs at such a position that the resulting fusion product, nucleic acid or protein, comprises an EGF-like domain of NRG1. Said EGF-like domain is preferably the EGF-like domain according to SEQ ID NO: 163, or an allelic variant thereof having at least 85% identity to SEQ ID NO: 163, preferably at least 90% identity, 92%, 94%, 96% or more preferably at least 98% sequence identity thereto.

[0176] Preferably, the portion of exon 2 of VTCN1, or the allelic variant thereof, is 5′ to the portion of exon 2 of NRG1, or the allelic variant thereof. This orientation at the nucleic acid level results in a fusion polypeptide product that contains an N-terminus of VTCN1 and a C-terminus of NRG1. Also, the herein provided VTCN1-NRG1 polynucleotide fusion produces a protein fusion, wherein the part from the N-terminus to the fusion junction is polypeptide sequence from VTCN1 and the part from the junction to the C-terminus is NRG1 polypeptide sequence, wherein the NRG1 part also provides its EGF-like domain. The VTCN1-NRG1 fusion protein thereby retains the EGF-like domain of NRG1 and the ability to drive proliferation and survival of a subset of human cancers, in particular an adenocarcinoma.

[0177] When present in an aberrant cell of a patient or subject, said polynucleotide fusion preferably further includes any sequence 5′ from exon 2 of VTCN1 and any sequence 3′ from exon 2 of NRG1, but to allow detection of the fusion junction using a polynucleotide-based detection assay, it may suffice that at least SEQ ID NOs: 169 and 126 are present. Any sequence 5′ from exon 2 of VTCN1 comprises or consists of SEQ ID NOs: 168 (or any allelic variant of SEQ ID NOs: 168), and any sequence 3′ of exon 2 of NRG1 comprises or consists of one or all of SEQ ID NOs: 127-137 (or any allelic variant of SEQ ID NOs: 127-137).

### CDH1-NRG1 Polynucleotide Fusion

[0178] There is also provided a polynucleotide fusion comprising a portion of exon 11 of CDH1 fused with a portion of exon 2 of NRG1. Exon 11 of CDH1 is preferably that of SEQ ID NO: 198, or an allelic variant of SEQ ID NO: 198, and exon 2 of NRG1 is preferably that of SEQ ID NO: 126, or an allelic variant of SEQ ID NO:126.

[0179] When present in an aberrant cell of a patient or subject, said polynucleotide fusion preferably further includes any sequence 5′ from exon 11 of CDH1 and any sequence 3′ from exon 2 of NRG1, but to allow detection of the fusion junction using a polynucleotide-based detection assay, it may suffice that at least SEQ ID NOs: 198 and 126 are present. Any sequence 5′ from exon 11 of CDH1 comprises or consists of one or all of SEQ ID NOs: 188-197 (or any allelic variant of SEQ ID NOs: 188-197), and any sequence 3′ of exon 2 of NRG1 comprises or consists of one or all of SEQ ID NOs: 127-137 (or any allelic variant of SEQ ID NOs: 127-137).

[0180] Preferably, the allelic variant of exon 11 of CDH1 has at least 85% identity to SEQ ID NO: 198, preferably at least 90% identity, 92%, 94%, 96% or more preferably at least 98% sequence identity thereto and the allelic variant of exon 2 of NRG1 has at least 85% identity to SEQ ID NO: 126, preferably at least 90% identity, 92%, 94%, 96% or more preferably at least 98% sequence identity thereto.

[0181] Preferably, the portion of exon 11 of CDH1 comprises or is according to SEQ ID NO: 184 and the allelic variant thereof has at least 85% identity to SEQ ID NO: 184, preferably at least 90% identity, 92%, 94%, 96% or more preferably at least 98% sequence identity thereto. The portion of exon 2 of NRG1 in the fusion with CDH1 preferably is or comprises the sequence according to SEQ ID NO: 185 and the allelic variant thereof has at least 85% identity to SEQ ID NO: 185, preferably at least 90% identity, 92%, 94%, 96% or more preferably at least 98% sequence identity thereto. More preferably, the portion of exon 11 of CDH1 comprises or consists of 2 to about 10, about 20, about 30, or up to about 40 or even all contiguous nucleic acids from SEQ ID NO: 184, including at least the nucleic acid of position 119. The number of contiguous nucleic acids may be 2, 3, 4, 5, 6, 7, 8, 9, 10, 11, 12, 13, 14, 15, 16, 17, 18, 19, 20, 21, 22, 23, 24, 25, 26, 27, 28, 29, 30, 31, 32, 33, 34, 35, 36, 37, 38, 39, 40 or all nucleic acids of SEQ ID NO: 184, including at least the nucleic acid of position 119. More preferably, the portion of exon 11 of CDH1 comprises or is according to SEQ ID NO: 184, or an allelic variant thereof. Such short polynucleotide sequences are particularly useful for detecting the presence of a larger polynucleotide fusion between CDH1 and NRG1 and establishing that such a fusion is an in-frame, oncogenic fusion comprising an EGF-like domain of NRG1.

[0182] Alternatively, the portion of exon 11 of CDH1 comprises or consists of SEQ ID NO: 198 (or an allelic variant of SEQ ID NO: 198), including at least the nucleic acid of position 146. Preferably, the portion of exon 11 of CDH1 comprises or consists of 2 to about 10, about 20, about 30, or up to about 40 or even all contiguous nucleic acids from SEQ ID NO: 198, or from the allelic variant thereof, including at least the nucleic acid of position 146. The number of contiguous nucleic acids may be 2, 3, 4, 5, 6, 7, 8, 9, 10, 11, 12, 13, 14, 15, 16, 17, 18, 19, 20, 21, 22, 23, 24, 25, 26, 27, 28, 29, 30, 31, 32, 33, 34, 35, 36, 37, 38, 39, 40 or all nucleic acids of SEQ ID NO: 198, including at least the nucleic acid of position 146. In this alternative, the portion of exon 11 of CDH1 more preferably comprises or is according to SEQ ID NO: 198, or an allelic variant thereof.

[0183] Preferably, any CDH1-NRG1 polynucleotide fusion provided herein is an in-frame fusion of CDH1 with NRG1. More preferably said fusion is an in-frame fusion comprising exon 11 of CDH1, or a portion of exon 2, with exon 2 of NRG1, or a portion of exon 2 of NRG1. Said in-frame fusion is preferably the fusion of SEQ ID NO: 186, or an allelic variant thereof having at least 85% identity thereto, preferably at least 90%, 92%, 94%, 96% or even 98% identity thereto.

[0184] In an alternatively preferred embodiment, the polynucleotide comprising a portion of exon 11 of CDH1 fused with a portion of exon 2 of NRG1 comprises 2 to about 10, about 20, about 30, or up to about 40 or even all contiguous nucleic acids from SEQ ID NO: 186, including the nucleic acids at positions 119 and 120. The number of contiguous nucleic acids may be 2, 3, 4, 5, 6, 7, 8, 9, 10, 11, 12, 13, 14, 15, 16, 17, 18, 19, 20, 21, 22, 23, 24, 25, 26, 27, 28, 29, 30, 31, 32, 33, 34, 35, 36, 37, 38, 39, 40 or all nucleic acids of SEQ ID NO: 186, including at least the nucleic acids at positions 119 and 120. SEQ ID NO: 186 includes the junction between CDH1 and NRG1, in particular the junction is between the nucleic acid at position 119, which stems from CDH1 and the nucleic acid at position 120 which stems from NRG1. Preferably, the polynucleotide comprising a portion of exon 11 of CDH1 fused with a portion of exon 2 of NRG1 has the polynucleotide sequence of SEQ ID NO: 186, or an allelic variant thereof.

[0185] In a preferred embodiment, there is provided a polynucleotide according to SEQ ID NO: 186, or a polynucleotide which comprises about 20, about 30, about 40 or all contiguous nucleic acids from SEQ ID NO: 186, preferably including the nucleic acids at positions 119 and 120. The number of contiguous nucleic acids may be 18, 19, 20, 21, 22, 23, 24, 25, 26, 27, 28, 29, 30, 31, 32, 33, 34, 35, 36, 37, 38, 39, 40 or all nucleic acids of SEQ ID NO: 186, preferably including at least the nucleic acids at positions 119 and 120.

[0186] Preferably, the polynucleotide comprising a portion of exon 11 of CDH1, or an allelic variant thereof, fused with a portion of exon 2 of NRG1, or an allelic variant thereof, is part of a longer polynucleotide that further comprises or encodes an EGF-like domain of NRG1. An aberrant cell comprising the polynucleotide fusion involving CDH1 or expressing the polypeptide fusion, comprises or encodes an EGF-like domain of NRG1. For quick detection, diagnosis or identification purposes, it may suffice to show that the fusion junction between CDH1 and NRG1 is in-frame and occurs at such a position that the resulting fusion product, nucleic acid or protein, comprises an EGF-like domain of NRG1. Said EGF-like domain is preferably the EGF-like domain according to SEQ ID NO: 163, or an allelic variant thereof having at least 85% identity to SEQ ID NO: 163, preferably at least 90% identity, 92%, 94%, 96% or more preferably at least 98% sequence identity thereto.

[0187] Preferably, the portion of exon 11 of CDH1, or the allelic variant thereof, is 5′ to the portion of exon 2 of NRG1, or the allelic variant thereof. This orientation at the nucleic acid level results in a fusion polypeptide product that contains an N-terminus of CDH1 and a C-terminus of NRG1. Also, the herein provided CDH1-NRG1 polynucleotide fusion produces a protein fusion, wherein the part from the N-terminus to the fusion junction is polypeptide sequence from CDH1 and the part from the junction to the C-terminus is NRG1 polypeptide sequence, wherein the NRG1 part also provides its EGF-like domain. The CDH1-NRG1 fusion protein thereby retains the EGF-like domain of NRG1 and the ability to drive proliferation and survival of a subset of human cancers, in particular an adenocarcinoma, more in particular pancreatic ductal adenocarcinoma.

### CXADR-NRG1 Polynucleotide Fusion

[0188] There is also provided a polynucleotide fusion comprising a portion of Exon 1 of CXADR fused with a portion of exon 2 of NRG1. Exon 1 of CXADR is preferably that of SEQ ID NO: 219, or an allelic variant of SEQ ID NO: 219, and exon 2 of NRG1 is preferably that of SEQ ID NO: 126, or an allelic variant of SEQ ID NO:126.

[0189] When present in an aberrant cell of a patient or subject, said polynucleotide fusion preferably further includes any sequence 5′ from exon 1 of CXADR and any sequence 3′ from exon 2 of NRG1, but to allow detection of the fusion junction using a polynucleotide-based detection assay, it may suffice that at least SEQ ID NOs: 219 and 126 are present. Any sequence 3′ of exon 2 of NRG1 comprises or consists of one or all of SEQ ID NOs: 127-137 (or any allelic variant of SEQ ID NOs: 127-137).

[0190] Preferably, the allelic variant of exon 1 of CXADR has at least 85% identity to SEQ ID NO: 219, preferably at least 90% identity, 92%, 94%, 96% or more preferably at least 98% sequence identity thereto and the allelic variant of exon 2 of NRG1 has at least 85% identity to SEQ ID NO: 126, preferably at least 90% identity, 92%, 94%, 96% or more preferably at least 98% sequence identity thereto.

[0191] Preferably, the portion of exon 1 of CXADR comprises or is according to SEQ ID NO: 215 and the allelic variant thereof has at least 85% identity to SEQ ID NO: 215, preferably at least 90% identity, 92%, 94%, 96% or more preferably at least 98% sequence identity thereto. The portion of exon 2 of NRG1 in the fusion with CXADR preferably is or comprises the sequence according to SEQ ID NO: 216 and the allelic variant thereof has at least 85% identity to SEQ ID NO: 216, preferably at least 90% identity, 92%, 94%, 96% or more preferably at least 98% sequence identity thereto. More preferably, the portion of exon 1 of CXADR comprises or consists of 2 to about 10, about 20, about 30, or up to about 40 or even all contiguous nucleic acids from SEQ ID NO: 215, including at least the nucleic acid of position 43. The number of contiguous nucleic acids may be 2, 3, 4, 5, 6, 7, 8, 9, 10, 11, 12, 13, 14, 15, 16, 17, 18, 19, 20, 21, 22, 23, 24, 25, 26, 27, 28, 29, 30, 31, 32, 33, 34, 35, 36, 37, 38, 39, 40 or all nucleic acids of SEQ ID NO: 215, including at least the nucleic acid of position 43. More preferably, the portion of exon 1 of CXADR comprises or is according to SEQ ID NO: 215, or an allelic variant thereof. Such short polynucleotide sequences are particularly useful for detecting the presence of a larger polynucleotide fusion between CXADR and NRG1 and establishing that such a fusion is an in-frame, oncogenic fusion comprising an EGF-like domain of NRG1.

[0192] Alternatively, the portion of exon 1 of CXADR comprises or consists of SEQ ID NO: 219 (or an allelic variant of SEQ ID NO: 219), including at least the nucleic acid of position 130. Preferably, the portion of exon 1 of CXADR comprises or consists of 2 to about 10, about 20, about 30, or up to about 40 or even all contiguous nucleic acids from SEQ ID NO: 219, or from the allelic variant thereof, including at least the nucleic acid of position 130. The number of contiguous nucleic acids may be 2, 3, 4, 5, 6, 7, 8, 9, 10, 11, 12, 13, 14, 15, 16, 17, 18, 19, 20, 21, 22, 23, 24, 25, 26, 27, 28, 29, 30, 31, 32, 33, 34, 35, 36, 37, 38, 39, 40 or all nucleic acids of SEQ ID NO: 219, including at least the nucleic acid of position 130. In this alternative, the portion of exon 1 of CXADR more preferably comprises or is according to SEQ ID NO: 219, or an allelic variant thereof.

[0193] Preferably, any CXADR-NRG1 polynucleotide fusion provided herein is an in-frame fusion of CXADR with NRG1. More preferably said fusion is an in-frame fusion comprising exon 1 of CXADR, or a portion of exon 2, with exon 2 of NRG1, or a portion of exon 2 of NRG1. Said in-frame fusion is preferably the fusion of SEQ ID NO: 217, or an allelic variant thereof having at least 85% identity thereto, preferably at least 90%, 92%, 94%, 96% or even 98% identity thereto.

[0194] In an alternatively preferred embodiment, the polynucleotide comprising a portion of exon 1 of CXADR fused with a portion of exon 2 of NRG1 comprises 2 to about 10, about 20, about 30, or up to about 40 or even all contiguous nucleic acids from SEQ ID NO: 217, including the nucleic acids at positions 43 and 44. The number of contiguous nucleic acids may be 2, 3, 4, 5, 6, 7, 8, 9, 10, 11, 12, 13, 14, 15, 16, 17, 18, 19, 20, 21, 22, 23, 24, 25, 26, 27, 28, 29, 30, 31, 32, 33, 34, 35, 36, 37, 38, 39, 40 or all nucleic acids of SEQ ID NO: 217, including at least the nucleic acids at positions 43 and 44. SEQ ID NO: 217 includes the junction between CXADR and NRG1, in particular the junction is between the nucleic acid at position 43, which stems from CXADR and the nucleic acid at position 44 which stems from NRG1. Preferably, the polynucleotide comprising a portion of exon 1 of CXADR fused with a portion of exon 2 of NRG1 has the polynucleotide sequence of SEQ ID NO: 217, or an allelic variant thereof. Preferably, the portion of exon 2 of NRG1 in the fusion with CXADR comprises or consists of 2 to about 10, about 20, about 30, or up to about 40 or even all contiguous nucleic acids from SEQ ID NO: 126, or from the allelic variant thereof, including at least the nucleic acid of position 1. The number of contiguous nucleic acids may be 2, 3, 4, 5, 6, 7, 8, 9, 10, 11, 12, 13, 14, 15, 16, 17, 18, 19, 20, 21, 22, 23, 24, 25, 26, 27, 28, 29, 30, 31, 32, 33, 34, 35, 36, 37, 38, 39, 40 or all nucleic acids of SEQ ID NO: 126, including at least the nucleic acid of position 1.

[0195] In a preferred embodiment, there is provided a polynucleotide according to SEQ ID NO: 217, or a polynucleotide which comprises about 20, about 30, about 40 or all contiguous nucleic acids from SEQ ID NO: 217, preferably including the nucleic acids at positions 43 and 44. The number of contiguous nucleic acids may be 18, 19, 20, 21, 22, 23, 24, 25, 26, 27, 28, 29, 30, 31, 32, 33, 34, 35, 36, 37, 38, 39, 40 or all nucleic acids of SEQ ID NO: 217, preferably including at least the nucleic acids at positions 43 and 44.

[0196] Preferably, the polynucleotide comprising a portion of exon 1 of CXADR, or an allelic variant thereof, fused with a portion of exon 2 of NRG1, or an allelic variant thereof, is part of a longer polynucleotide that further comprises or encodes an EGF-like domain of NRG1. An aberrant cell comprising the polynucleotide fusion involving CXADR or expressing the polypeptide fusion, comprises or encodes an EGF-like domain of NRG1. For quick detection, diagnosis or identification purposes, it may suffice to show that the fusion junction between CXADR and NRG1 is in frame and occurs at such a position that the resulting fusion product, nucleic acid or protein, comprises an EGF-like domain of NRG1. Said EGF-like domain is preferably the EGF-like domain according to SEQ ID NO: 163, or an allelic variant thereof having at least 85% identity to SEQ ID NO: 163, preferably at least 90% identity, 92%, 94%, 96% or more preferably at least 98% sequence identity thereto.

[0197] Preferably, the portion of exon 1 of CXADR, or the allelic variant thereof, is 5′ to the portion of exon 2 of NRG1, or the allelic variant thereof. This orientation at the nucleic acid level results in a fusion polypeptide product that contains an N-terminus of CXADR and a C-terminus of NRG1. Also, the herein provided CXADR-NRG1 polynucleotide fusion produces a protein fusion, wherein the part from the N-terminus to the fusion junction is polypeptide sequence from CXADR and the part from the junction to the C-terminus is NRG1 polypeptide sequence, wherein the NRG1 part also provides its EGF-like domain. The CXADR-NRG1 fusion protein thereby retains the EGF-like domain of NRG1 and the ability to drive proliferation and survival of a subset of human cancers, in particular colon cancer.

### GTF2E2-NRG1 Polynucleotide Fusion

[0198] There is also provided a polynucleotide fusion comprising a portion of exon 2 of GTF2E2 fused with a portion of exon 2 of NRG1. Exon 2 of GTF2E2 is preferably that of SEQ ID NO: 236, or an allelic variant of SEQ ID NO: 236, and exon 2 of NRG1 is preferably that of SEQ ID NO: 126, or an allelic variant of SEQ ID NO:126.

[0199] When present in an aberrant cell of a patient or subject, said polynucleotide fusion preferably further includes any sequence 5′ from exon 2 of GTF2E2 and any sequence 3′ from exon 2 of NRG1, but to allow detection of the fusion junction using a polynucleotide-based detection assay, it may suffice that at least SEQ ID NOs: 236 and 126 are present. Any sequence 5′ from exon 2 of GTF2E2 comprises or consists of one or all of SEQ ID NO: 235 (or any allelic variant of SEQ ID NO: 235), and any sequence 3′ of exon 2 of NRG1 comprises or consists of one or all of SEQ ID NOs: 127-137 (or any allelic variant of SEQ ID NOs: 127-137).

[0200] Preferably, the allelic variant of exon 2 of GTF2E2 has at least 85% identity to SEQ ID NO: 236, preferably at least 90% identity, 92%, 94%, 96% or more preferably at least 98% sequence identity thereto and the allelic variant of exon 2 of NRG1 has at least 85% identity to SEQ ID NO: 126, preferably at least 90% identity, 92%, 94%, 96% or more preferably at least 98% sequence identity thereto.

[0201] Preferably, the portion of exon 2 of GTF2E2 comprises or is according to SEQ ID NO: 231 and the allelic variant thereof has at least 85% identity to SEQ ID NO: 231, preferably at least 90% identity, 92%, 94%, 96% or more preferably at least 98% sequence identity thereto. The portion of exon 2 of NRG1 in the fusion with GTF2E2 preferably is or comprises the sequence according to SEQ ID NO: 232 and the allelic variant thereof has at least 85% identity to SEQ ID NO: 232, preferably at least 90% identity, 92%, 94%, 96% or more preferably at least 98% sequence identity thereto. More preferably, the portion of exon 2 of GTF2E2 comprises or consists of 2 to about 10, about 20, about 30, or up to about 40 or even all contiguous nucleic acids from SEQ ID NO: 231, including at least the nucleic acid of position 141. The number of contiguous nucleic acids may be 2, 3, 4, 5, 6, 7, 8, 9, 10, 11, 12, 13, 14, 15, 16, 17, 18, 19, 20, 21, 22, 23, 24, 25, 26, 27, 28, 29, 30, 31, 32, 33, 34, 35, 36, 37, 38, 39, 40 or all nucleic acids of SEQ ID NO: 231, including at least the nucleic acid of position 141. More preferably, the portion of exon 2 of GTF2E2 comprises or is according to SEQ ID NO: 231, or an allelic variant thereof. Such short polynucleotide sequences are particularly useful for detecting the presence of a larger polynucleotide fusion between GTF2E2 and NRG1 and establishing that such a fusion is an in-frame, oncogenic fusion comprising an EGF-like domain of NRG1.

[0202] Alternatively, the portion of exon 2 of GTF2E2 comprises or consists of SEQ ID NO: 236 (or an allelic variant of SEQ ID NO: 236), including at least the nucleic acid of position 170. Preferably, the portion of exon 2 of GTF2E2 comprises or consists of 2 to about 10, about 20, about 30, or up to about 40 or even all contiguous nucleic acids from SEQ ID NO: 236, or from the allelic variant thereof, including at least the nucleic acid of position 170. The number of contiguous nucleic acids may be 2, 3, 4, 5, 6, 7, 8, 9, 10, 11, 12, 13, 14, 15, 16, 17, 18, 19, 20, 21, 22, 23, 24, 25, 26, 27, 28, 29, 30, 31, 32, 33, 34, 35, 36, 37, 38, 39, 40 or all nucleic acids of SEQ ID NO: 236, including at least the nucleic acid of position 170. In this alternative, the portion of exon 2 of GTF2E2 more preferably comprises or is according to SEQ ID NO: 236, or an allelic variant thereof. Preferably, the portion of exon 2 of NRG1 in the fusion with GTF2E2 comprises or consists of 2 to about 10, about 20, about 30, or up to about 40 or even all contiguous nucleic acids from SEQ ID NO: 126, or from the allelic variant thereof, including at least the nucleic acid of position 1. The number of contiguous nucleic acids may be 2, 3, 4, 5, 6, 7, 8, 9, 10, 11, 12, 13, 14, 15, 16, 17, 18, 19, 20, 21, 22, 23, 24, 25, 26, 27, 28, 29, 30, 31, 32, 33, 34, 35, 36, 37, 38, 39, 40 or all nucleic acids of SEQ ID NO: 126, including at least the nucleic acid of position 1.

[0203] Preferably, any GTF2E2-NRG1 polynucleotide fusion provided herein is an in-frame fusion of GTF2E2 with NRG1. More preferably said fusion is an in-frame fusion comprising exon 2 of GTF2E2, or a portion of exon 2, with exon 2 of NRG1, or a portion of exon 2 of NRG1. Said in frame fusion is preferably the fusion of SEQ ID NO: 233, or an allelic variant thereof having at least 85% identity thereto, preferably at least 90%, 92%, 94%, 96% or even 98% identity thereto.

[0204] In an alternatively preferred embodiment, the polynucleotide comprising a portion of exon 2 of GTF2E2 fused with a portion of exon 2 of NRG1 comprises 2 to about 10, about 20, about 30, or up to about 40 or even all contiguous nucleic acids from SEQ ID NO: 233, including the nucleic acids at positions 141 and 142. The number of contiguous nucleic acids may be 2, 3, 4, 5, 6, 7, 8, 9, 10, 11, 12, 13, 14, 15, 16, 17, 18, 19, 20, 21, 22, 23, 24, 25, 26, 27, 28, 29, 30, 31, 32, 33, 34, 35, 36, 37, 38, 39, 40 or all nucleic acids of SEQ ID NO: 233, including at least the nucleic acids at positions 141 and 142. SEQ ID NO: 233 includes the junction between GTF2E2 and NRG1, in particular the junction is between the nucleic acid at position 141, which stems from GTF2E2 and the nucleic acid at position 142 which stems from NRG1. Preferably, the polynucleotide comprising a portion of exon 2 of GTF2E2 fused with a portion of exon 2 of NRG1 has the polynucleotide sequence of SEQ ID NO: 233, or an allelic variant thereof.

[0205] In a preferred embodiment, there is provided a polynucleotide according to SEQ ID NO: 233, or a polynucleotide which comprises about 20, about 30, about 40 or all contiguous nucleic acids from SEQ ID NO: 233, preferably including the nucleic acids at positions 141 and 142. The number of contiguous nucleic acids may be 18, 19, 20, 21, 22, 23, 24, 25, 26, 27, 28, 29, 30, 31, 32, 33, 34, 35, 36, 37, 38, 39, 40 or all nucleic acids of SEQ ID NO: 233, preferably including at least the nucleic acids at positions 141 and 142.

[0206] Preferably, the polynucleotide comprising a portion of exon 2 of GTF2E2, or an allelic variant thereof, fused with a portion of exon 2 of NRG1, or an allelic variant thereof, is part of a longer polynucleotide that further comprises or encodes an EGF-like domain of NRG1. An aberrant cell comprising the polynucleotide fusion involving GTF2E2 or expressing the polypeptide fusion, comprises or encodes an EGF-like domain of NRG1. For quick detection, diagnosis or identification purposes, it may suffice to show that the fusion junction between GTF2E2 and NRG1 is in-frame and occurs at such a position that the resulting fusion product, nucleic acid or protein, comprises an EGF-like domain of NRG1. Said EGF-like domain is preferably the EGF-like domain according to SEQ ID NO: 163, or an allelic variant thereof having at least 85% identity to SEQ ID NO: 163, preferably at least 90% identity, 92%, 94%, 96% or more preferably at least 98% sequence identity thereto.

[0207] Preferably, the portion of exon 2 of GTF2E2, or the allelic variant thereof, is 5′ to the portion of exon 2 of NRG1, or the allelic variant thereof. This orientation at the nucleic acid level results in a fusion polypeptide product that contains an N-terminus of GTF2E2 and a C-terminus of NRG1. Also, the herein provided GTF2E2-NRG1 polynucleotide fusion produces a protein fusion, wherein the part from the N-terminus to the fusion junction is polypeptide sequence from GTF2E2 and the part from the junction to the C-terminus is NRG1 polypeptide sequence, wherein the NRG1 part also provides its EGF-like domain. The GTF2E2-NRG1 fusion protein thereby retains the EGF-like domain of NRG1 and the ability to drive proliferation and survival of a subset of human cancers, in particular an adenocarcinoma, more in particular (metastatic) breast adenocarcinoma NOS.

### CSMD1-NRG1 Polynucleotide Fusion

[0208] There is also provided a polynucleotide fusion comprising a portion of exon 23 of CSMD1 fused with a portion of exon 6 of NRG1. Exon 23 of CSMD1 is preferably that of SEQ ID NO: 279, or an allelic variant of SEQ ID NO: 279, and exon 6 of NRG1 is preferably that of SEQ ID NO: 130, or an allelic variant of SEQ ID NO:130.

[0209] When present in an aberrant cell of a patient or subject, said polynucleotide fusion preferably further includes any sequence 5′ from exon 23 of CSMD1 and any sequence 3′ from exon 6 of NRG1, but to allow detection of the fusion junction using a polynucleotide-based detection assay, it may suffice that at least SEQ ID NOs: 279 and 130 are present. Any sequence 5′ from exon 23 of CSMD1 comprises or consists of one or all of SEQ ID NOs: 257-278 (or any allelic variant of SEQ ID NOs: 257-278), and any sequence 3′ of exon 6 of NRG1 comprises or consists of one or all of SEQ ID NOs: 131-137 (or any allelic variant of SEQ ID NOs: 131-137).

[0210] Preferably, the allelic variant of exon 23 of CSMD1 has at least 85% identity to SEQ ID NO: 279, preferably at least 90% identity, 92%, 94%, 96% or more preferably at least 98% sequence identity thereto and the allelic variant of exon 6 of NRG1 has at least 85% identity to SEQ ID NO: 130, preferably at least 90% identity, 92%, 94%, 96% or more preferably at least 98% sequence identity thereto.

[0211] Preferably, the portion of exon 23 of CSMD1 comprises or is according to SEQ ID NO: 253 and the allelic variant thereof has at least 85% identity to SEQ ID NO: 253, preferably at least 90% identity, 92%, 94%, 96% or more preferably at least 98% sequence identity thereto. The portion of exon 6 of NRG1 in the fusion with CSMD1 preferably is or comprises the sequence according to SEQ ID NO: 254 and the allelic variant thereof has at least 85% identity to SEQ ID NO: 254, preferably at least 90% identity, 92%, 94%, 96% or more preferably at least 98% sequence identity thereto. More preferably, the portion of exon 23 of CSMD1 comprises or consists of 2 to about 10, about 20, about 30, or up to about 40 or even all contiguous nucleic acids from SEQ ID NO: 253, including at least the nucleic acid of position 88. The number of contiguous nucleic acids may be 2, 3, 4, 5, 6, 7, 8, 9, 10, 11, 12, 13, 14, 15, 16, 17, 18, 19, 20, 21, 22, 23, 24, 25, 26, 27, 28, 29, 30, 31, 32, 33, 34, 35, 36, 37, 38, 39, 40 or all nucleic acids of SEQ ID NO: 253, including at least the nucleic acid of position 88. More preferably, the portion of exon 23 of CSMD1 comprises or is according to SEQ ID NO: 253, or an allelic variant thereof. Such short polynucleotide sequences are particularly useful for detecting the presence of a larger polynucleotide fusion between CSMD1 and NRG1 and establishing that such a fusion is an in-frame, oncogenic fusion comprising an EGF-like domain of NRG1.

[0212] Alternatively, the portion of exon 23 of CSMD1 comprises or consists of SEQ ID NO: 279 (or an allelic variant of SEQ ID NO: 279), including at least the nucleic acid of position 157. Preferably, the portion of exon 23 of CSMD1 comprises or consists of 2 to about 10, about 20, about 30, or up to about 40 or even all contiguous nucleic acids from SEQ ID NO: 279, or from the allelic variant thereof, including at least the nucleic acid of position 157. The number of contiguous nucleic acids may be 2, 3, 4, 5, 6, 7, 8, 9, 10, 11, 12, 13, 14, 15, 16, 17, 18, 19, 20, 21, 22, 23, 24, 25, 26, 27, 28, 29, 30, 31, 32, 33, 34, 35, 36, 37, 38, 39, 40 or all nucleic acids of SEQ ID NO: 279, including at least the nucleic acid of position 157. In this alternative, the portion of exon 23 of CSMD1 more preferably comprises or is according to SEQ ID NO: 279, or an allelic variant thereof. Preferably, the portion of exon 6 of NRG1 in the fusion with CSMD1 comprises or consists of 2 to about 10, about 20, about 30, or up to about 40 or even all contiguous nucleic acids from SEQ ID NO: 130, or from the allelic variant thereof, including at least the nucleic acid of position 1. The number of contiguous nucleic acids may be 2, 3, 4, 5, 6, 7, 8, 9, 10, 11, 12, 13, 14, 15, 16, 17, 18, 19, 20, 21, 22, 23, 24, 25, 26, 27, 28, 29, 30, 31, 32, 33, 34, 35, 36, 37, 38, 39, 40 or all nucleic acids of SEQ ID NO: 130, including at least the nucleic acid of position 1.

[0213] Preferably, any CSMD1-NRG1 polynucleotide fusion provided herein is an in-frame fusion of CSMD1 with NRG1. More preferably said fusion is an in-frame fusion comprising exon 23 of CSMD1, or a portion of exon 6, with exon 6 of NRG1, or a portion of exon 6 of NRG1. Said in-frame fusion is preferably the fusion of SEQ ID NO: 255, or an allelic variant thereof having at least 85% identity thereto, preferably at least 90%, 92%, 94%, 96% or even 98% identity thereto.

[0214] In an alternatively preferred embodiment, the polynucleotide comprising a portion of exon 23 of CSMD1 fused with a portion of exon 6 of NRG1 comprises 2 to about 10, about 20, about 30, or up to about 40 or even all contiguous nucleic acids from SEQ ID NO: 255, including the nucleic acids at positions 88 and 89. The number of contiguous nucleic acids may be 2, 3, 4, 5, 6, 7, 8, 9, 10, 11, 12, 13, 14, 15, 16, 17, 18, 19, 20, 21, 22, 23, 24, 25, 26, 27, 28, 29, 30, 31, 32, 33, 34, 35, 36, 37, 38, 39, 40 or all nucleic acids of SEQ ID NO: 255, including at least the nucleic acids at positions 88 and 89. SEQ ID NO: 255 includes the junction between CSMD1 and NRG1, in particular the junction is between the nucleic acid at position 88, which stems from CSMD1 and the nucleic acid at position 89 which stems from NRG1. Preferably, the polynucleotide comprising a portion of exon 23 of CSMD1 fused with a portion of exon 6 of NRG1 has the polynucleotide sequence of SEQ ID NO: 255, or an allelic variant thereof.

[0215] In a preferred embodiment, there is provided a polynucleotide according to SEQ ID NO: 255, or a polynucleotide which comprises about 20, about 30, about 40 or all contiguous nucleic acids from SEQ ID NO: 255, preferably including the nucleic acids at positions 88 and 89. The number of contiguous nucleic acids may be 18, 19, 20, 21, 22, 23, 24, 25, 26, 27, 28, 29, 30, 31, 32, 33, 34, 35, 36, 37, 38, 39, 40 or all nucleic acids of SEQ ID NO: 255, preferably including at least the nucleic acids at positions 88 and 89.

[0216] Preferably, the polynucleotide comprising a portion of exon 23 of CSMD1, or an allelic variant thereof, fused with a portion of exon 6 of NRG1, or an allelic variant thereof, is part of a longer polynucleotide that further comprises or encodes an EGF-like domain of NRG1. An aberrant cell comprising the polynucleotide fusion involving CSMD1 or expressing the polypeptide fusion, comprises or encodes an EGF-like domain of NRG1. For quick detection, diagnosis or identification purposes, it may suffice to show that the fusion junction between CSMD1 and NRG1 is in-frame and occurs at such a position that the resulting fusion product, nucleic acid or protein, comprises an EGF-like domain of NRG1. Said EGF-like domain is preferably the EGF-like domain according to SEQ ID NO: 163, or an allelic variant thereof having at least 85% identity to SEQ ID NO: 163, preferably at least 90% identity, 92%, 94%, 96% or more preferably at least 98% sequence identity thereto.

[0217] Preferably, the portion of exon 23 of CSMD1, or the allelic variant thereof, is 5′ to the portion of exon 6 of NRG1, or the allelic variant thereof. This orientation at the nucleic acid level results in a fusion polypeptide product that contains an N-terminus of CSMD1 and a C-terminus of NRG1. Also, the herein provided CSMD1-NRG1 polynucleotide fusion produces a protein fusion, wherein the part from the N-terminus to the fusion junction is polypeptide sequence from CSMD1 and the part from the junction to the C-terminus is NRG1 polypeptide sequence, wherein the NRG1 part also provides its EGF-like domain. The CSMD1-NRG1 fusion protein thereby retains the EGF-like domain of NRG1 and the ability to drive proliferation and survival of a subset of human cancers, in particular an adenocarcinoma, more in particular pancreatic ductal adenocarcinoma.

### PTN-NRG1 Polynucleotide Fusion

[0218] There is also provided a polynucleotide fusion comprising a portion of exon 4 of PTN fused with a portion of exon 2 of NRG1. Exon 4 of PTN is preferably that of SEQ ID NO: 318, or an allelic variant of SEQ ID NO: 318, and exon 2 of NRG1 is preferably that of SEQ ID NO: 126, or an allelic variant of SEQ ID NO:126.

[0219] When present in an aberrant cell of a patient or subject, said polynucleotide fusion preferably further includes any sequence 5′ from exon 4 of PTN and any sequence 3′ from exon 2 of NRG1, but to allow detection of the fusion junction using a polynucleotide-based detection assay, it may suffice that at least SEQ ID NOs: 318 and 126 are present. Any sequence 5′ from exon 4 of PTN comprises or consists of one or all of SEQ ID NOs: 315-317 (or any allelic variant of SEQ ID NOs: 315-317), and any sequence 3′ of exon 2 of NRG1 comprises or consists of one or all of SEQ ID NOs: 127-137 (or any allelic variant of SEQ ID NOs: 127-137).

[0220] Preferably, the allelic variant of exon 4 of PTN has at least 85% identity to SEQ ID NO: 318, preferably at least 90% identity, 92%, 94%, 96% or more preferably at least 98% sequence identity thereto and the allelic variant of exon 2 of NRG1 has at least 85% identity to SEQ ID NO: 126, preferably at least 90% identity, 92%, 94%, 96% or more preferably at least 98% sequence identity thereto.

[0221] Preferably, the portion of exon 4 of PTN comprises or is according to SEQ ID NO: 311 and the allelic variant thereof has at least 85% identity to SEQ ID NO: 311, preferably at least 90% identity, 92%, 94%, 96% or more preferably at least 98% sequence identity thereto. The portion of exon 2 of NRG1 in the fusion with PTN preferably is or comprises the sequence according to SEQ ID NO: 312 and the allelic variant thereof has at least 85% identity to SEQ ID NO: 312, preferably at least 90% identity, 92%, 94%, 96% or more preferably at least 98% sequence identity thereto. More preferably, the portion of exon 4 of PTN comprises or consists of 2 to about 10, about 20, about 30, or up to about 40 or even all contiguous nucleic acids from SEQ ID NO: 311, including at least the nucleic acid of position 102. The number of contiguous nucleic acids may be 2, 3, 4, 5, 6, 7, 8, 9, 10, 11, 12, 13, 14, 15, 16, 17, 18, 19, 20, 21, 22, 23, 24, 25, 26, 27, 28, 29, 30, 31, 32, 33, 34, 35, 36, 37, 38, 39, 40 or all nucleic acids of SEQ ID NO: 311, including at least the nucleic acid of position 102. More preferably, the portion of exon 4 of PTN comprises or is according to SEQ ID NO: 311, or an allelic variant thereof. Such short polynucleotide sequences are particularly useful for detecting the presence of a larger polynucleotide fusion between PTN and NRG1 and establishing that such a fusion is an in-frame, oncogenic fusion comprising an EGF-like domain of NRG1.

[0222] Alternatively, the portion of exon 4 of PTN comprises or consists of SEQ ID NO: 318 (or an allelic variant of SEQ ID NO: 318), including at least the nucleic acid of position 162. Preferably, the portion of exon 4 of PTN comprises or consists of 2 to about 10, about 20, about 30, or up to about 40 or even all contiguous nucleic acids from SEQ ID NO: 318, or from the allelic variant thereof, including at least the nucleic acid of position 162. The number of contiguous nucleic acids may be 2, 3, 4, 5, 6, 7, 8, 9, 10, 11, 12, 13, 14, 15, 16, 17, 18, 19, 20, 21, 22, 23, 24, 25, 26, 27, 28, 29, 30, 31, 32, 33, 34, 35, 36, 37, 38, 39, 40 or all nucleic acids of SEQ ID NO: 318, including at least the nucleic acid of position 162. In this alternative, the portion of exon 4 of PTN more preferably comprises or is according to SEQ ID NO: 318, or an allelic variant thereof. Preferably, the portion of exon 2 of NRG1 in the fusion with PTN comprises or consists of 2 to about 10, about 20, about 30, or up to about 40 or even all contiguous nucleic acids from SEQ ID NO: 126, or from the allelic variant thereof, including at least the nucleic acid of position 1. The number of contiguous nucleic acids may be 2, 3, 4, 5, 6, 7, 8, 9, 10, 11, 12, 13, 14, 15, 16, 17, 18, 19, 20, 21, 22, 23, 24, 25, 26, 27, 28, 29, 30, 31, 32, 33, 34, 35, 36, 37, 38, 39, 40 or all nucleic acids of SEQ ID NO: 126, including at least the nucleic acid of position 1.

[0223] Preferably, any PTN-NRG1 polynucleotide fusion provided herein is an in-frame fusion of PTN with NRG1. More preferably said fusion is an in frame fusion comprising exon 4 of PTN, or a portion of exon 2, with exon 2 of NRG1, or a portion of exon 2 of NRG1. Said in-frame fusion is preferably the fusion of SEQ ID NO: 313, or an allelic variant thereof having at least 85% identity thereto, preferably at least 90%, 92%, 94%, 96% or even 98% identity thereto.

[0224] In an alternatively preferred embodiment, the polynucleotide comprising a portion of exon 4 of PTN fused with a portion of exon 2 of NRG1 comprises 2 to about 10, about 20, about 30, or up to about 40 or even all contiguous nucleic acids from SEQ ID NO: 313, including the nucleic acids at positions 102 and 103. The number of contiguous nucleic acids may be 2, 3, 4, 5, 6, 7, 8, 9, 10, 11, 12, 13, 14, 15, 16, 17, 18, 19, 20, 21, 22, 23, 24, 25, 26, 27, 28, 29, 30, 31, 32, 33, 34, 35, 36, 37, 38, 39, 40 or all nucleic acids of SEQ ID NO: 313, including at least the nucleic acids at positions 102 and 103. SEQ ID NO: 313 includes the junction between PTN and NRG1, in particular the junction is between the nucleic acid at position 102, which stems from PTN and the nucleic acid at position 103 which stems from NRG1. Preferably, the polynucleotide comprising a portion of exon 4 of PTN fused with a portion of exon 2 of NRG1 has the polynucleotide sequence of SEQ ID NO: 313, or an allelic variant thereof.

[0225] In a preferred embodiment, there is provided a polynucleotide according to SEQ ID NO: 313, or a polynucleotide which comprises about 20, about 30, about 40 or all contiguous nucleic acids from SEQ ID NO: 313, preferably including the nucleic acids at positions 102 and 103. The number of contiguous nucleic acids may be 18, 19, 20, 21, 22, 23, 24, 25, 26, 27, 28, 29, 30, 31, 32, 33, 34, 35, 36, 37, 38, 39, 40 or all nucleic acids of SEQ ID NO: 313, preferably including at least the nucleic acids at positions 102 and 103.

[0226] Preferably, the polynucleotide comprising a portion of exon 4 of PTN, or an allelic variant thereof, fused with a portion of exon 2 of NRG1, or an allelic variant thereof, is part of a longer polynucleotide that further comprises or encodes an EGF-like domain of NRG1. An aberrant cell comprising the polynucleotide fusion involving PTN or expressing the polypeptide fusion, comprises or encodes an EGF-like domain of NRG1. For quick detection, diagnosis or identification purposes, it may suffice to show that the fusion junction between PTN and NRG1 is in-frame and occurs at such a position that the resulting fusion product, nucleic acid or protein, comprises an EGF-like domain of NRG1. Said EGF-like domain is preferably the EGF-like domain according to SEQ ID NO: 163, or an allelic variant thereof having at least 85% identity to SEQ ID NO: 163, preferably at least 90% identity, 92%, 94%, 96% or more preferably at least 98% sequence identity thereto.

[0227] Preferably, the portion of exon 4 of PTN, or the allelic variant thereof, is 5′ to the portion of exon 2 of NRG1, or the allelic variant thereof. This orientation at the nucleic acid level results in a fusion polypeptide product that contains an N-terminus of PTN and a C-terminus of NRG1. Also, the herein provided PTN-NRG1 polynucleotide fusion produces a protein fusion, wherein the part from the N-terminus to the fusion junction is polypeptide sequence from PTN and the part from the junction to the C-terminus is NRG1 polypeptide sequence, wherein the NRG1 part also provides its EGF-like domain. The PTN-NRG1 fusion protein thereby retains the EGF-like domain of NRG1 and the ability to drive proliferation and survival of a subset of human cancers, in particular an adenocarcinoma, more in particular pancreatic ductal adenocarcinoma.

### ST14-NRG1 Polynucleotide Fusion

[0228] There is also provided a polynucleotide fusion comprising a portion of exon 11 of ST14 fused with a portion of exon 6 of NRG1. Exon 11 of ST14 is preferably that of SEQ ID NO: 342, or an allelic variant of SEQ ID NO: 342, and exon 6 of NRG1 is preferably that of SEQ ID NO: 130, or an allelic variant of SEQ ID NO:130.

[0229] When present in an aberrant cell of a patient or subject, said polynucleotide fusion preferably further includes any sequence 5′ from exon 11 of ST14 and any sequence 3′ from exon 6 of NRG1, but to allow detection of the fusion junction using a polynucleotide-based detection assay, it may suffice that at least SEQ ID NOs: 342 and 130 are present. Any sequence 5′ from exon 11 of ST14 comprises or consists of one or all of SEQ ID NOs: 332-341 (or any allelic variant of SEQ ID NOs: 332-341), and any sequence 3′ of exon 6 of NRG1 comprises or consists of one or all of SEQ ID NOs: 131-137 (or any allelic variant of SEQ ID NOs: 131-137).

[0230] Preferably, the allelic variant of exon 11 of ST14 has at least 85% identity to SEQ ID NO: 342, preferably at least 90% identity, 92%, 94%, 96% or more preferably at least 98% sequence identity thereto and the allelic variant of exon 6 of NRG1 has at least 85% identity to SEQ ID NO: 130, preferably at least 90% identity, 92%, 94%, 96% or more preferably at least 98% sequence identity thereto.

[0231] Preferably, the portion of exon 11 of ST14 comprises or is according to SEQ ID NO: 328 and the allelic variant thereof has at least 85% identity to SEQ ID NO: 328, preferably at least 90% identity, 92%, 94%, 96% or more preferably at least 98% sequence identity thereto. The portion of exon 6 of NRG1 in the fusion with ST14 preferably is or comprises the sequence according to SEQ ID NO: 329 and the allelic variant thereof has at least 85% identity to SEQ ID NO: 329, preferably at least 90% identity, 92%, 94%, 96% or more preferably at least 98% sequence identity thereto. More preferably, the portion of exon 11 of ST14 comprises or consists of 2 to about 10, about 20, about 30, or up to about 40 or even all contiguous nucleic acids from SEQ ID NO: 328, including at least the nucleic acid of position 95. The number of contiguous nucleic acids may be 2, 3, 4, 5, 6, 7, 8, 9, 10, 11, 12, 13, 14, 15, 16, 17, 18, 19, 20, 21, 22, 23, 24, 25, 26, 27, 28, 29, 30, 31, 32, 33, 34, 35, 36, 37, 38, 39, 40 or all nucleic acids of SEQ ID NO: 328, including at least the nucleic acid of position 95. More preferably, the portion of exon 11 of ST14 comprises or is according to SEQ ID NO: 328, or an allelic variant thereof. Such short polynucleotide sequences are particularly useful for detecting the presence of a larger polynucleotide fusion between ST14 and NRG1 and establishing that such a fusion is an in-frame, oncogenic fusion comprising an EGF-like domain of NRG1.

[0232] Alternatively, the portion of exon 11 of ST14 comprises or consists of SEQ ID NO: 342 (or an allelic variant of SEQ ID NO: 342), including at least the nucleic acid of position 131. Preferably, the portion of exon 11 of ST14 comprises or consists of 2 to about 10, about 20, about 30, or up to about 40 or even all contiguous nucleic acids from SEQ ID NO: 342, or from the allelic variant thereof, including at least the nucleic acid of position 131. The number of contiguous nucleic acids may be 2, 3, 4, 5, 6, 7, 8, 9, 10, 11, 12, 13, 14, 15, 16, 17, 18, 19, 20, 21, 22, 23, 24, 25, 26, 27, 28, 29, 30, 31, 32, 33, 34, 35, 36, 37, 38, 39, 40 or all nucleic acids of SEQ ID NO: 342, including at least the nucleic acid of position 131. In this alternative, the portion of exon 11 of ST14 more preferably comprises or is according to SEQ ID NO: 342, or an allelic variant thereof. Preferably, the portion of exon 6 of NRG1 in the fusion with ST14 comprises or consists of 2 to about 10, about 20, about 30, or up to about 40 or even all contiguous nucleic acids from SEQ ID NO: 130, or from the allelic variant thereof, including at least the nucleic acid of position 1. The number of contiguous nucleic acids may be 2, 3, 4, 5, 6, 7, 8, 9, 10, 11, 12, 13, 14, 15, 16, 17, 18, 19, 20, 21, 22, 23, 24, 25, 26, 27, 28, 29, 30, 31, 32, 33, 34, 35, 36, 37, 38, 39, 40 or all nucleic acids of SEQ ID NO: 130, including at least the nucleic acid of position 1.

[0233] Preferably, any ST14-NRG1 polynucleotide fusion provided herein is an in-frame fusion of ST14 with NRG1. More preferably said fusion is an in-frame fusion comprising exon 11 of ST14, or a portion of exon 6, with exon 6 of NRG1, or a portion of exon 6 of NRG1. Said in-frame fusion is preferably the fusion of SEQ ID NO: 330, or an allelic variant thereof having at least 85% identity thereto, preferably at least 90%, 92%, 94%, 96% or even 98% identity thereto.

[0234] In an alternatively preferred embodiment, the polynucleotide comprising a portion of exon 11 of ST14 fused with a portion of exon 6 of NRG1 comprises 2 to about 10, about 20, about 30, or up to about 40 or even all contiguous nucleic acids from SEQ ID NO: 330, including the nucleic acids at positions 95 and 96. The number of contiguous nucleic acids may be 2, 3, 4, 5, 6, 7, 8, 9, 10, 11, 12, 13, 14, 15, 16, 17, 18, 19, 20, 21, 22, 23, 24, 25, 26, 27, 28, 29, 30, 31, 32, 33, 34, 35, 36, 37, 38, 39, 40 or all nucleic acids of SEQ ID NO: 330, including at least the nucleic acids at positions 95 and 96. SEQ ID NO: 330 includes the junction between ST14 and NRG1, in particular the junction is between the nucleic acid at position 95, which stems from ST14 and the nucleic acid at position 96 which stems from NRG1. Preferably, the polynucleotide comprising a portion of exon 11 of ST14 fused with a portion of exon 6 of NRG1 has the polynucleotide sequence of SEQ ID NO: 330, or an allelic variant thereof.

[0235] In a preferred embodiment, there is provided a polynucleotide according to SEQ ID NO: 330, or a polynucleotide which comprises about 20, about 30, about 40 or all contiguous nucleic acids from SEQ ID NO: 330, preferably including the nucleic acids at positions 95 and 96. The number of contiguous nucleic acids may be 18, 19, 20, 21, 22, 23, 24, 25, 26, 27, 28, 29, 30, 31, 32, 33, 34, 35, 36, 37, 38, 39, 40 or all nucleic acids of SEQ ID NO: 330, preferably including at least the nucleic acids at positions 95 and 96.

[0236] Preferably, the polynucleotide comprising a portion of exon 11 of ST14, or an allelic variant thereof, fused with a portion of exon 6 of NRG1, or an allelic variant thereof, is part of a longer polynucleotide that further comprises or encodes an EGF-like domain of NRG1. An aberrant cell comprising the polynucleotide fusion involving ST14 or expressing the polypeptide fusion, comprises or encodes an EGF-like domain of NRG1. For quick detection, diagnosis or identification purposes, it may suffice to show that the fusion junction between ST14 and NRG1 is in-frame and occurs at such a position that the resulting fusion product, nucleic acid or protein, comprises an EGF-like domain of NRG1. Said EGF-like domain is preferably the EGF-like domain according to SEQ ID NO: 163, or an allelic variant thereof having at least 85% identity to SEQ ID NO: 163, preferably at least 90% identity, 92%, 94%, 96% or more preferably at least 98% sequence identity thereto.

[0237] Preferably, the portion of exon 11 of ST14, or the allelic variant thereof, is 5′ to the portion of exon 6 of NRG1, or the allelic variant thereof. This orientation at the nucleic acid level results in a fusion polypeptide product that contains an N-terminus of ST14 and a C-terminus of NRG1. Also, the herein provided ST14-NRG1 polynucleotide fusion produces a protein fusion, wherein the part from the N-terminus to the fusion junction is polypeptide sequence from ST14 and the part from the junction to the C-terminus is NRG1 polypeptide sequence, wherein the NRG1 part also provides its EGF-like domain. The ST14-NRG1 fusion protein thereby retains the EGF-like domain of NRG1 and the ability to drive proliferation and survival of a subset of human cancers, in particular an adenocarcinoma, more in particular pancreatic ductal adenocarcinoma.

### THBS1-NRG1 Polynucleotide Fusion

[0238] There is also provided a polynucleotide fusion comprising a portion of exon 9 of THBS1 fused with a portion of exon 6 of NRG1. Exon 9 of THBS1 is preferably that of SEQ ID NO: 386, or an allelic variant of SEQ ID NO: 386, and exon 6 of NRG1 is preferably that of SEQ ID NO: 130, or an allelic variant of SEQ ID NO:130.

[0239] When present in an aberrant cell of a patient or subject, said polynucleotide fusion preferably further includes any sequence 5′ from exon 9 of THBS1 and any sequence 3′ from exon 6 of NRG1, but to allow detection of the fusion junction using a polynucleotide-based detection assay, it may suffice that at least SEQ ID NOs: 386 and 130 are present. Any sequence 5′ from exon 9 of THBS1 comprises or consists of one or all of SEQ ID NOs: 378-385 (or any allelic variant of SEQ ID NOs: 378-385), and any sequence 3′ of exon 6 of NRG1 comprises or consists of one or all of SEQ ID NOs: 131-137 (or any allelic variant of SEQ ID NOs: 131-137).

[0240] Preferably, the allelic variant of exon 9 of THBS1 has at least 85% identity to SEQ ID NO: 386, preferably at least 90% identity, 92%, 94%, 96% or more preferably at least 98% sequence identity thereto and the allelic variant of exon 6 of NRG1 has at least 85% identity to SEQ ID NO: 130, preferably at least 90% identity, 92%, 94%, 96% or more preferably at least 98% sequence identity thereto.

[0241] Preferably, the portion of exon 9 of THBS1 comprises or is according to SEQ ID NO: 374 and the allelic variant thereof has at least 85% identity to SEQ ID NO: 374, preferably at least 90% identity, 92%, 94%, 96% or more preferably at least 98% sequence identity thereto. The portion of exon 6 of NRG1 in the fusion with THBS1 preferably is or comprises the sequence according to SEQ ID NO: 375 and the allelic variant thereof has at least 85% identity to SEQ ID NO: 375, preferably at least 90% identity, 92%, 94%, 96% or more preferably at least 98% sequence identity thereto. More preferably, the portion of exon 9 of THBS1 comprises or consists of 2 to about 10, about 20, about 30, or up to about 40 or even all contiguous nucleic acids from SEQ ID NO: 374, including at least the nucleic acid of position 56. The number of contiguous nucleic acids may be 2, 3, 4, 5, 6, 7, 8, 9, 10, 11, 12, 13, 14, 15, 16, 17, 18, 19, 20, 21, 22, 23, 24, 25, 26, 27, 28, 29, 30, 31, 32, 33, 34, 35, 36, 37, 38, 39, 40 or all nucleic acids of SEQ ID NO: 374, including at least the nucleic acid of position 56. More preferably, the portion of exon 9 of THBS1 comprises or is according to SEQ ID NO: 374, or an allelic variant thereof. Such short polynucleotide sequences are particularly useful for detecting the presence of a larger polynucleotide fusion between THBS1 and NRG1 and establishing that such a fusion is an in-frame, oncogenic fusion comprising an EGF-like domain of NRG1.

[0242] Alternatively, the portion of exon 9 of THBS1 comprises or consists of SEQ ID NO: 386 (or an allelic variant of SEQ ID NO: 386), including at least the nucleic acid of position 177. Preferably, the portion of exon 9 of THBS1 comprises or consists of 2 to about 10, about 20, about 30, or up to about 40 or even all contiguous nucleic acids from SEQ ID NO: 386, or from the allelic variant thereof, including at least the nucleic acid of position 177. The number of contiguous nucleic acids may be 2, 3, 4, 5, 6, 7, 8, 9, 10, 11, 12, 13, 14, 15, 16, 17, 18, 19, 20, 21, 22, 23, 24, 25, 26, 27, 28, 29, 30, 31, 32, 33, 34, 35, 36, 37, 38, 39, 40 or all nucleic acids of SEQ ID NO: 386, including at least the nucleic acid of position 177. In this alternative, the portion of exon 9 of THBS1 more preferably comprises or is according to SEQ ID NO: 386, or an allelic variant thereof. Preferably, the portion of exon 6 of NRG1 in the fusion with THBS1 comprises or consists of 2 to about 10, about 20, about 30, or up to about 40 or even all contiguous nucleic acids from SEQ ID NO: 130, or from the allelic variant thereof, including at least the nucleic acid of position 1. The number of contiguous nucleic acids may be 2, 3, 4, 5, 6, 7, 8, 9, 10, 11, 12, 13, 14, 15, 16, 17, 18, 19, 20, 21, 22, 23, 24, 25, 26, 27, 28, 29, 30, 31, 32, 33, 34, 35, 36, 37, 38, 39, 40 or all nucleic acids of SEQ ID NO: 130, including at least the nucleic acid of position 1.

[0243] Preferably, any THBS1-NRG1 polynucleotide fusion provided herein is an in-frame fusion of THBS1 with NRG1. More preferably said fusion is an in-frame fusion comprising exon 9 of THBS1, or a portion of exon 6, with exon 6 of NRG1, or a portion of exon 6 of NRG1. Said in-frame fusion is preferably the fusion of SEQ ID NO: 376, or an allelic variant thereof having at least 85% identity thereto, preferably at least 90%, 92%, 94%, 96% or even 98% identity thereto.

[0244] In an alternatively preferred embodiment, the polynucleotide comprising a portion of exon 9 of THBS1 fused with a portion of exon 6 of NRG1 comprises 2 to about 10, about 20, about 30, or up to about 40 or even all contiguous nucleic acids from SEQ ID NO: 376, including the nucleic acids at positions 56 and 57. The number of contiguous nucleic acids may be 2, 3, 4, 5, 6, 7, 8, 9, 10, 11, 12, 13, 14, 15, 16, 17, 18, 19, 20, 21, 22, 23, 24, 25, 26, 27, 28, 29, 30, 31, 32, 33, 34, 35, 36, 37, 38, 39, 40 or all nucleic acids of SEQ ID NO: 376, including at least the nucleic acids at positions 56 and 57. SEQ ID NO: 376 includes the junction between THBS1 and NRG1, in particular the junction is between the nucleic acid at position 56, which stems from THBS1 and the nucleic acid at position 57 which stems from NRG1. Preferably, the polynucleotide comprising a portion of exon 9 of THBS1 fused with a portion of exon 6 of NRG1 has the polynucleotide sequence of SEQ ID NO: 376, or an allelic variant thereof.

[0245] In a preferred embodiment, there is provided a polynucleotide according to SEQ ID NO: 376, or a polynucleotide which comprises about 20, about 30, about 40 or all contiguous nucleic acids from SEQ ID NO: 376, preferably including the nucleic acids at positions 56 and 57. The number of contiguous nucleic acids may be 18, 19, 20, 21, 22, 23, 24, 25, 26, 27, 28, 29, 30, 31, 32, 33, 34, 35, 36, 37, 38, 39, 40 or all nucleic acids of SEQ ID NO: 376, preferably including at least the nucleic acids at positions 56 and 57.

[0246] Preferably, the polynucleotide comprising a portion of exon 9 of THBS1, or an allelic variant thereof, fused with a portion of exon 6 of NRG1, or an allelic variant thereof, is part of a longer polynucleotide that further comprises or encodes an EGF-like domain of NRG1. An aberrant cell comprising the polynucleotide fusion involving THBS1 or expressing the polypeptide fusion, comprises or encodes an EGF-like domain of NRG1. For quick detection, diagnosis or identification purposes, it may suffice to show that the fusion junction between THBS1 and NRG1 is in-frame and occurs at such a position that the resulting fusion product, nucleic acid or protein, comprises an EGF-like domain of NRG1. Said EGF-like domain is preferably the EGF-like domain according to SEQ ID NO: 163, or an allelic variant thereof having at least 85% identity to SEQ ID NO: 163, preferably at least 90% identity, 92%, 94%, 96% or more preferably at least 98% sequence identity thereto.

[0247] Preferably, the portion of exon 9 of THBS1, or the allelic variant thereof, is 5′ to the portion of exon 6 of NRG1, or the allelic variant thereof. This orientation at the nucleic acid level results in a fusion polypeptide product that contains an N-terminus of THBS1 and a C-terminus of NRG1. Also, the herein provided THBS1-NRG1 polynucleotide fusion produces a protein fusion, wherein the part from the N-terminus to the fusion junction is polypeptide sequence from THBS1 and the part from the junction to the C-terminus is NRG1 polypeptide sequence, wherein the NRG1 part also provides its EGF-like domain. The THBS1-NRG1 fusion protein thereby retains the EGF-like domain of NRG1 and the ability to drive proliferation and survival of a subset of human cancers, in particular an adenocarcinoma, more in particular pancreatic ductal adenocarcinoma.

### AGRN-NRG1 Polynucleotide Fusion

[0248] There is also provided a polynucleotide fusion comprising a portion of exon 12 of AGRN fused with a portion of exon 6 of NRG1. Exon 12 of AGRN is preferably that of SEQ ID NO: 416, or an allelic variant of SEQ ID NO: 416, and exon 6 of NRG1 is preferably that of SEQ ID NO: 130, or an allelic variant of SEQ ID NO:130.

[0249] When present in an aberrant cell of a patient or subject, said polynucleotide fusion preferably further includes any sequence 5′ from exon 12 of AGRN and any sequence 3′ from exon 6 of NRG1, but to allow detection of the fusion junction using a polynucleotide-based detection assay, it may suffice that at least SEQ ID NOs: 416 and 130 are present. Any sequence 5′ from exon 12 of AGRN comprises or consists of one or all of SEQ ID NOs: 405-415 (or any allelic variant of SEQ ID NOs: 405-415), and any sequence 3′ of exon 6 of NRG1 comprises or consists of one or all of SEQ ID NOs: 131-137 (or any allelic variant of SEQ ID NOs: 131-137).

[0250] Preferably, the allelic variant of exon 12 of AGRN has at least 85% identity to SEQ ID NO: 416, preferably at least 90% identity, 92%, 94%, 96% or more preferably at least 98% sequence identity thereto and the allelic variant of exon 6 of NRG1 has at least 85% identity to SEQ ID NO: 130, preferably at least 90% identity, 92%, 94%, 96% or more preferably at least 98% sequence identity thereto.

[0251] Preferably, the portion of exon 12 of AGRN comprises or is according to SEQ ID NO: 401 and the allelic variant thereof has at least 85% identity to SEQ ID NO: 401, preferably at least 90% identity, 92%, 94%, 96% or more preferably at least 98% sequence identity thereto. The portion of exon 6 of NRG1 in the fusion with AGRN preferably is or comprises the sequence according to SEQ ID NO: 402 and the allelic variant thereof has at least 85% identity to SEQ ID NO: 402, preferably at least 90% identity, 92%, 94%, 96% or more preferably at least 98% sequence identity thereto. More preferably, the portion of exon 12 of AGRN comprises or consists of 2 to about 10, about 20, about 30, or up to about 40 or even all contiguous nucleic acids from SEQ ID NO: 401, including at least the nucleic acid of position 106. The number of contiguous nucleic acids may be 2, 3, 4, 5, 6, 7, 8, 9, 10, 11, 12, 13, 14, 15, 16, 17, 18, 19, 20, 21, 22, 23, 24, 25, 26, 27, 28, 29, 30, 31, 32, 33, 34, 35, 36, 37, 38, 39, 40 or all nucleic acids of SEQ ID NO: 401, including at least the nucleic acid of position 106. More preferably, the portion of exon 12 of AGRN comprises or is according to SEQ ID NO: 401, or an allelic variant thereof. Such short polynucleotide sequences are particularly useful for detecting the presence of a larger polynucleotide fusion between AGRN and NRG1 and establishing that such a fusion is an in-frame, oncogenic fusion comprising an EGF-like domain of NRG1.

[0252] Alternatively, the portion of exon 12 of AGRN comprises or consists of SEQ ID NO: 416 (or an allelic variant of SEQ ID NO: 416), including at least the nucleic acid of position 106. Preferably, the portion of exon 12 of AGRN comprises or consists of 2 to about 10, about 20, about 30, or up to about 40 or even all contiguous nucleic acids from SEQ ID NO: 416, or from the allelic variant thereof, including at least the nucleic acid of position 106. The number of contiguous nucleic acids may be 2, 3, 4, 5, 6, 7, 8, 9, 10, 11, 12, 13, 14, 15, 16, 17, 18, 19, 20, 21, 22, 23, 24, 25, 26, 27, 28, 29, 30, 31, 32, 33, 34, 35, 36, 37, 38, 39, 40 or all nucleic acids of SEQ ID NO: 416, including at least the nucleic acid of position 106. In this alternative, the portion of exon 12 of AGRN more preferably comprises or is according to SEQ ID NO: 416, or an allelic variant thereof. Preferably, the portion of exon 6 of NRG1 in the fusion with AGRN comprises or consists of 2 to about 10, about 20, about 30, or up to about 40 or even all contiguous nucleic acids from SEQ ID NO: 130, or from the allelic variant thereof, including at least the nucleic acid of position 1. The number of contiguous nucleic acids may be 2, 3, 4, 5, 6, 7, 8, 9, 10, 11, 12, 13, 14, 15, 16, 17, 18, 19, 20, 21, 22, 23, 24, 25, 26, 27, 28, 29, 30, 31, 32, 33, 34, 35, 36, 37, 38, 39, 40 or all nucleic acids of SEQ ID NO: 130, including at least the nucleic acid of position 1.

[0253] Preferably, any AGRN-NRG1 polynucleotide fusion provided herein is an in-frame fusion of AGRN with NRG1. More preferably said fusion is an in frame fusion comprising exon 12 of AGRN, or a portion of exon 12, with exon 6 of NRG1, or a portion of exon 6 of NRG1. Said in-frame fusion is preferably the fusion of SEQ ID NO: 403, or an allelic variant thereof having at least 85% identity thereto, preferably at least 90%, 92%, 94%, 96% or even 98% identity thereto.

[0254] In an alternatively preferred embodiment, the polynucleotide comprising a portion of exon 12 of AGRN fused with a portion of exon 6 of NRG1 comprises 2 to about 10, about 20, about 30, or up to about 40 or even all contiguous nucleic acids from SEQ ID NO: 403, including the nucleic acids at positions 106 and 107. The number of contiguous nucleic acids may be 2, 3, 4, 5, 6, 7, 8, 9, 10, 11, 12, 13, 14, 15, 16, 17, 18, 19, 20, 21, 22, 23, 24, 25, 26, 27, 28, 29, 30, 31, 32, 33, 34, 35, 36, 37, 38, 39, 40 or all nucleic acids of SEQ ID NO: 403, including at least the nucleic acids at positions 106 and 107. SEQ ID NO: 403 includes the junction between AGRN and NRG1, in particular the junction is between the nucleic acid at position 106, which stems from AGRN and the nucleic acid at position 107 which stems from NRG1. Preferably, the polynucleotide comprising a portion of exon 12 of AGRN fused with a portion of exon 6 of NRG1 has the polynucleotide sequence of SEQ ID NO: 403, or an allelic variant thereof.

[0255] In a preferred embodiment, there is provided a polynucleotide according to SEQ ID NO: 403, or a polynucleotide which comprises about 20, about 30, about 40 or all contiguous nucleic acids from SEQ ID NO: 403, preferably including the nucleic acids at positions 106 and 107. The number of contiguous nucleic acids may be 18, 19, 20, 21, 22, 23, 24, 25, 26, 27, 28, 29, 30, 31, 32, 33, 34, 35, 36, 37, 38, 39, 40 or all nucleic acids of SEQ ID NO: 403, preferably including at least the nucleic acids at positions 106 and 107.

[0256] Preferably, the polynucleotide comprising a portion of exon 12 of AGRN, or an allelic variant thereof, fused with a portion of exon 6 of NRG1, or an allelic variant thereof, is part of a longer polynucleotide that further comprises or encodes an EGF-like domain of NRG1. An aberrant cell comprising the polynucleotide fusion involving AGRN or expressing the polypeptide fusion, comprises or encodes an EGF-like domain of NRG1. For quick detection, diagnosis or identification purposes, it may suffice to show that the fusion junction between AGRN and NRG1 is in-frame and occurs at such a position that the resulting fusion product, nucleic acid or protein, comprises an EGF-like domain of NRG1. Said EGF-like domain is preferably the EGF-like domain according to SEQ ID NO: 163, or an allelic variant thereof having at least 85% identity to SEQ ID NO: 163, preferably at least 90% identity, 92%, 94%, 96% or more preferably at least 98% sequence identity thereto.

[0257] Preferably, the portion of exon 12 of AGRN, or the allelic variant thereof, is 5′ to the portion of exon 6 of NRG1, or the allelic variant thereof. This orientation at the nucleic acid level results in a fusion polypeptide product that contains an N-terminus of AGRN and a C-terminus of NRG1. Also, the herein provided AGRN-NRG1 polynucleotide fusion produces a protein fusion, wherein the part from the N-terminus to the fusion junction is polypeptide sequence from AGRN and the part from the junction to the C-terminus is NRG1 polypeptide sequence, wherein the NRG1 part also provides its EGF-like domain. The AGRN-NRG1 fusion protein thereby retains the EGF-like domain of NRG1 and the ability to drive proliferation and survival of a subset of human cancers, in particular an adenocarcinoma, more in particular pancreatic ductal adenocarcinoma.

### PVALB-NRG1 Polynucleotide Fusion

[0258] In accordance with the present disclosure, there is also provided a polynucleotide comprising a PVALB nucleic acid sequence (or a portion of a PVALB nucleic acid sequence) fused with an NRG1 nucleic acid sequence (or a portion of an NRG1 nucleic acid sequence). Also included in said fusion are allelic variants of PVALB and NRG1 nucleic acid sequences.

[0259] Preferably, the PVALB nucleic acid sequence, or the portion thereof, comprises or consists of any one of SEQ ID NOs: 439-444, or an allelic variant of any one of SEQ ID NOs: 439-444, and the NRG1 nucleic acid sequence, or the portion thereof, comprises or consists of any one of SEQ ID NOs: 125-138, or an allelic variant of any one of SEQ ID NOs: 125-138. More preferably, the PVALB nucleic acid sequence comprises a portion of SEQ ID NOs: 444, or an allelic variant of SEQ ID NOs: 444, and the NRG1 nucleic acid sequence preferably comprises a portion of SEQ ID NOs: 138, or an allelic variant of SEQ ID NOs: 138. SEQ ID NOs: 439-443 correspond to the individual exons 1-5 of PVALB according to NM_002854.3, respectively. SEQ ID NO: 444 corresponds to exons 1-5 of PVALB according to NM_002854.3. SEQ ID NOs: 125-137 correspond to the individual exons 1-13 of the NRG1 sequence according to NM_001159999, respectively. SEQ ID NO: 138 corresponds to exons 1-13 of NRG1 according to NM_001159999.

[0260] In a preferred embodiment, the portion of the PVALB nucleic acid sequence comprises 2 to about 10, about 20, about 30, or up to about 40 or even all contiguous nucleic acids from any one of SEQ ID NOs: 439-444, or an allelic variant of any one of SEQ ID NOs: 439-444, and the portion of the NRG1 nucleic acid sequence comprises 2 to about 10, about 20, about 30, or up to about 40 or even all contiguous nucleic acids of any one of SEQ ID NOs: 125-138, or an allelic variant of any one of SEQ ID NOs: 125-138.

[0261] There is also provided a polynucleotide fusion comprising a portion of exon 4 of PVALB fused with a portion of exon 6 of NRG1. Exon 4 of PVALB is preferably that of SEQ ID NO: 442, or an allelic variant of SEQ ID NO: 442, and exon 6 of NRG1 is preferably that of SEQ ID NO: 130, or an allelic variant of SEQ ID NO:130.

[0262] When present in an aberrant cell of a patient or subject, said polynucleotide fusion preferably further includes any sequence 5′ from exon 4 of PVALB and any sequence 3′ from exon 6 of NRG1, but to allow detection of the fusion junction using a polynucleotide-based detection assay, it may suffice that at least SEQ ID NOs: 442 and 130 are present. Any sequence 5′ from exon 4 of PVALB comprises or consists of one or all of SEQ ID NOs: 439-441 (or any allelic variant of SEQ ID NOs: 439-441), and any sequence 3′ of exon 6 of NRG1 comprises or consists of one or all of SEQ ID NOs: 131-137 (or any allelic variant of SEQ ID NOs: 131-137).

[0263] Preferably, the allelic variant of exon 4 of PVALB has at least 85% identity to SEQ ID NO: 442, preferably at least 90% identity, 92%, 94%, 96% or more preferably at least 98% sequence identity thereto and the allelic variant of exon 6 of NRG1 has at least 85% identity to SEQ ID NO: 130, preferably at least 90% identity, 92%, 94%, 96% or more preferably at least 98% sequence identity thereto.

[0264] Preferably, the portion of exon 4 of PVALB comprises or is according to SEQ ID NO: 435 and the allelic variant thereof has at least 85% identity to SEQ ID NO: 435, preferably at least 90% identity, 92%, 94%, 96% or more preferably at least 98% sequence identity thereto. The portion of exon 6 of NRG1 in the fusion with PVALB preferably is or comprises the sequence according to SEQ ID NO: 436 and the allelic variant thereof has at least 85% identity to SEQ ID NO: 436, preferably at least 90% identity, 92%, 94%, 96% or more preferably at least 98% sequence identity thereto. More preferably, the portion of exon 4 of PVALB comprises or consists of 2 to about 10, about 20, about 30, or up to about 40 or even all contiguous nucleic acids from SEQ ID NO: 435, including at least the nucleic acid of position 102. The number of contiguous nucleic acids may be 2, 3, 4, 5, 6, 7, 8, 9, 10, 11, 12, 13, 14, 15, 16, 17, 18, 19, 20, 21, 22, 23, 24, 25, 26, 27, 28, 29, 30, 31, 32, 33, 34, 35, 36, 37, 38, 39, 40 or all nucleic acids of SEQ ID NO: 435, including at least the nucleic acid of position 102. More preferably, the portion of exon 4 of PVALB comprises or is according to SEQ ID NO: 435, or an allelic variant thereof. Such short polynucleotide sequences are particularly useful for detecting the presence of a larger polynucleotide fusion between PVALB and NRG1 and establishing that such a fusion is an in-frame, oncogenic fusion comprising an EGF-like domain of NRG1.

[0265] Alternatively, the portion of exon 4 of PVALB comprises or consists of SEQ ID NO: 442 (or an allelic variant of SEQ ID NO: 442), including at least the nucleic acid of position 110. Preferably, the portion of exon 4 of PVALB comprises or consists of 2 to about 10, about 20, about 30, or up to about 40 or even all contiguous nucleic acids from SEQ ID NO: 442, or from the allelic variant thereof, including at least the nucleic acid of position 110. The number of contiguous nucleic acids may be 2, 3, 4, 5, 6, 7, 8, 9, 10, 11, 12, 13, 14, 15, 16, 17, 18, 19, 20, 21, 22, 23, 24, 25, 26, 27, 28, 29, 30, 31, 32, 33, 34, 35, 36, 37, 38, 39, 40 or all nucleic acids of SEQ ID NO: 442, including at least the nucleic acid of position 110. In this alternative, the portion of exon 4 of PVALB more preferably comprises or is according to SEQ ID NO: 442, or an allelic variant thereof. Preferably, the portion of exon 6 of NRG1 in the fusion with PVALB comprises or consists of 2 to about 10, about 20, about 30, or up to about 40 or even all contiguous nucleic acids from SEQ ID NO: 130, or from the allelic variant thereof, including at least the nucleic acid of position 1. The number of contiguous nucleic acids may be 2, 3, 4, 5, 6, 7, 8, 9, 10, 11, 12, 13, 14, 15, 16, 17, 18, 19, 20, 21, 22, 23, 24, 25, 26, 27, 28, 29, 30, 31, 32, 33, 34, 35, 36, 37, 38, 39, 40 or all nucleic acids of SEQ ID NO: 130, including at least the nucleic acid of position 1.

[0266] Preferably, any PVALB-NRG1 polynucleotide fusion provided herein is an in-frame fusion of PVALB with NRG1. More preferably said fusion is an in-frame fusion comprising exon 4 of PVALB, or a portion of exon 4, with exon 6 of NRG1, or a portion of exon 6 of NRG1. Said in frame fusion is preferably the fusion of SEQ ID NO: 437, or an allelic variant thereof having at least 85% identity thereto, preferably at least 90%, 92%, 94%, 96% or even 98% identity thereto.

[0267] In an alternatively preferred embodiment, the polynucleotide comprising a portion of exon 4 of PVALB fused with a portion of exon 6 of NRG1 comprises 2 to about 10, about 20, about 30, or up to about 40 or even all contiguous nucleic acids from SEQ ID NO: 437, including the nucleic acids at positions 102 and 103. The number of contiguous nucleic acids may be 2, 3, 4, 5, 6, 7, 8, 9, 10, 11, 12, 13, 14, 15, 16, 17, 18, 19, 20, 21, 22, 23, 24, 25, 26, 27, 28, 29, 30, 31, 32, 33, 34, 35, 36, 37, 38, 39, 40 or all nucleic acids of SEQ ID NO: 437, including at least the nucleic acids at positions 102 and 103. SEQ ID NO: 437 includes the junction between PVALB and NRG1, in particular the junction is between the nucleic acid at position 102, which stems from PVALB and the nucleic acid at position 103 which stems from NRG1. Preferably, the polynucleotide comprising a portion of exon 4 of PVALB fused with a portion of exon 6 of NRG1 has the polynucleotide sequence of SEQ ID NO: 437, or an allelic variant thereof.

[0268] Preferably, the polynucleotide comprising a portion of exon 4 of PVALB, or an allelic variant thereof, fused with a portion of exon 6 of NRG1, or an allelic variant thereof, is part of a longer polynucleotide that further comprises or encodes an EGF-like domain of NRG1. An aberrant cell comprising the polynucleotide fusion involving PVALB or expressing the polypeptide fusion, comprises or encodes an EGF-like domain of NRG1. For quick detection, diagnosis or identification purposes, it may suffice to show that the fusion junction between PVALB and NRG1 is in-frame and occurs at such a position that the resulting fusion product, nucleic acid or protein, comprises an EGF-like domain of NRG1. Said EGF-like domain is preferably the EGF-like domain according to SEQ ID NO: 163, or an allelic variant thereof having at least 85% identity to SEQ ID NO: 163, preferably at least 90% identity, 92%, 94%, 96% or more preferably at least 98% sequence identity thereto.

[0269] Preferably, the portion of exon 4 of PVALB, or the allelic variant thereof, is 5′ to the portion of exon 6 of NRG1, or the allelic variant thereof. This orientation at the nucleic acid level results in a fusion polypeptide product that contains an N-terminus of PVALB and a C-terminus of NRG1. Also, the herein provided PVALB-NRG1 polynucleotide fusion produces a protein fusion, wherein the part from the N-terminus to the fusion junction is polypeptide sequence from PVALB and the part from the junction to the C-terminus is NRG1 polypeptide sequence, wherein the NRG1 part also provides its EGF-like domain. The PVALB-NRG1 fusion protein thereby retains the EGF-like domain of NRG1 and the ability to drive proliferation and survival of a subset of human cancers, in particular an adenocarcinoma, more in particular pancreatic ductal adenocarcinoma.

### APP-NRG1 Polynucleotide Fusion

[0270] There is also provided a polynucleotide fusion comprising a portion of Exon 14 of APP fused with a portion of exon 6 of NRG1. Exon 14 of APP is preferably that of SEQ ID NO: 501, or an allelic variant of SEQ ID NO: 501, and exon 6 of NRG1 is preferably that of SEQ ID NO: 130, or an allelic variant of SEQ ID NO:130.

[0271] When present in an aberrant cell of a patient or subject, said polynucleotide fusion preferably further includes any sequence 5′ from Exon 14 of APP and any sequence 3′ from exon 6 of NRG1, but to allow detection of the fusion junction using a polynucleotide-based detection assay, it may suffice that at least SEQ ID NOs: 501 and 130 are present. Any sequence 5′ from Exon 14 of APP comprises or consists of one or all of SEQ ID NOs: 488-500 (or any allelic variant of SEQ ID NOs: 488-500), and any sequence 3′ of exon 6 of NRG1 comprises or consists of one or all of SEQ ID NOs: 131-137 (or any allelic variant of SEQ ID NOs: 131-137).

[0272] Preferably, the allelic variant of Exon 14 of APP has at least 85% identity to SEQ ID NO: 501, preferably at least 90% identity, 92%, 94%, 96% or more preferably at least 98% sequence identity thereto and the allelic variant of exon 6 of NRG1 has at least 85% identity to SEQ ID NO: 130, preferably at least 90% identity, 92%, 94%, 96% or more preferably at least 98% sequence identity thereto.

[0273] Preferably, the portion of Exon 14 of APP comprises or is according to SEQ ID NO: 484 and the allelic variant thereof has at least 85% identity to SEQ ID NO: 484, preferably at least 90% identity, 92%, 94%, 96% or more preferably at least 98% sequence identity thereto. The portion of exon 6 of NRG1 in the fusion with APP preferably is or comprises the sequence according to SEQ ID NO: 485 and the allelic variant thereof has at least 85% identity to SEQ ID NO: 485, preferably at least 90% identity, 92%, 94%, 96% or more preferably at least 98% sequence identity thereto. More preferably, the portion of Exon 14 of APP comprises or consists of 2 to about 10, about 20, about 30, or up to about 40 or even all contiguous nucleic acids from SEQ ID NO: 484, including at least the nucleic acid of position 54. The number of contiguous nucleic acids may be 2, 3, 4, 5, 6, 7, 8, 9, 10, 11, 12, 13, 14, 15, 16, 17, 18, 19, 20, 21, 22, 23, 24, 25, 26, 27, 28, 29, 30, 31, 32, 33, 34, 35, 36, 37, 38, 39, 40 or all nucleic acids of SEQ ID NO: 484, including at least the nucleic acid of position 54. More preferably, the portion of Exon 14 of APP comprises or is according to SEQ ID NO: 484, or an allelic variant thereof. Such short polynucleotide sequences are particularly useful for detecting the presence of a larger polynucleotide fusion between APP and NRG1 and establishing that such a fusion is an in-frame, oncogenic fusion comprising an EGF-like domain of NRG1.

[0274] Alternatively, the portion of Exon 14 of APP comprises or consists of SEQ ID NO: 501 (or an allelic variant of SEQ ID NO: 501), including at least the nucleic acid of position 54. Preferably, the portion of Exon 14 of APP comprises or consists of 2 to about 10, about 20, about 30, or up to about 40 or even all contiguous nucleic acids from SEQ ID NO: 501, or from the allelic variant thereof, including at least the nucleic acid of position 54. The number of contiguous nucleic acids may be 2, 3, 4, 5, 6, 7, 8, 9, 10, 11, 12, 13, 14, 15, 16, 17, 18, 19, 20, 21, 22, 23, 24, 25, 26, 27, 28, 29, 30, 31, 32, 33, 34, 35, 36, 37, 38, 39, 40 or all nucleic acids of SEQ ID NO: 501, including at least the nucleic acid of position 54. In this alternative, the portion of Exon 14 of APP more preferably comprises or is according to SEQ ID NO: 501, or an allelic variant thereof. Preferably, the portion of exon 6 of NRG1 in the fusion with APP comprises or consists of 2 to about 10, about 20, about 30, or up to about 40 or even all contiguous nucleic acids from SEQ ID NO: 130, or from the allelic variant thereof, including at least the nucleic acid of position 1. The number of contiguous nucleic acids may be 2, 3, 4, 5, 6, 7, 8, 9, 10, 11, 12, 13, 14, 15, 16, 17, 18, 19, 20, 21, 22, 23, 24, 25, 26, 27, 28, 29, 30, 31, 32, 33, 34, 35, 36, 37, 38, 39, 40 or all nucleic acids of SEQ ID NO: 130, including at least the nucleic acid of position 1.

[0275] Preferably, any APP-NRG1 polynucleotide fusion provided herein is an in-frame fusion of APP with NRG1. More preferably said fusion is an in-frame fusion comprising Exon 14 of APP, or a portion of Exon 14, with exon 6 of NRG1, or a portion of exon 6 of NRG1. Said in-frame fusion is preferably the fusion of SEQ ID NO: 486, or an allelic variant thereof having at least 85% identity thereto, preferably at least 90%, 92%, 94%, 96% or even 98% identity thereto.

[0276] In an alternatively preferred embodiment, the polynucleotide comprising a portion of Exon 14 of APP fused with a portion of exon 6 of NRG1 comprises 2 to about 10, about 20, about 30, or up to about 40 or even all contiguous nucleic acids from SEQ ID NO: 486, including the nucleic acids at positions 54 and 55. The number of contiguous nucleic acids may be 2, 3, 4, 5, 6, 7, 8, 9, 10, 11, 12, 13, 14, 15, 16, 17, 18, 19, 20, 21, 22, 23, 24, 25, 26, 27, 28, 29, 30, 31, 32, 33, 34, 35, 36, 37, 38, 39, 40 or all nucleic acids of SEQ ID NO: 486, including at least the nucleic acids at positions 54 and 55. SEQ ID NO: 486 includes the junction between APP and NRG1, in particular the junction is between the nucleic acid at position 54, which stems from APP and the nucleic acid at position 55 which stems from NRG1. Preferably, the polynucleotide comprising a portion of Exon 14 of APP fused with a portion of exon 6 of NRG1 has the polynucleotide sequence of SEQ ID NO: 486, or an allelic variant thereof.

[0277] In a preferred embodiment, there is provided a polynucleotide according to SEQ ID NO: 486, or a polynucleotide which comprises about 20, about 30, about 40 or all contiguous nucleic acids from SEQ ID NO: 486, preferably including the nucleic acids at positions 54 and 55. The number of contiguous nucleic acids may be 18, 19, 20, 21, 22, 23, 24, 25, 26, 27, 28, 29, 30, 31, 32, 33, 34, 35, 36, 37, 38, 39, 40 or all nucleic acids of SEQ ID NO: 486, preferably including at least the nucleic acids at positions 54 and 55.

[0278] Preferably, the polynucleotide comprising a portion of Exon 14 of APP, or an allelic variant thereof, fused with a portion of exon 6 of NRG1, or an allelic variant thereof, is part of a longer polynucleotide that further comprises or encodes an EGF-like domain of NRG1. An aberrant cell comprising the polynucleotide fusion involving APP or expressing the polypeptide fusion, comprises or encodes an EGF-like domain of NRG1. For quick detection, diagnosis or identification purposes, it may suffice to show that the fusion junction between APP and NRG1 is in-frame and occurs at such a position that the resulting fusion product, nucleic acid or protein, comprises an EGF-like domain of NRG1. Said EGF-like domain is preferably the EGF-like domain according to SEQ ID NO: 163, or an allelic variant thereof having at least 85% identity to SEQ ID NO: 163, preferably at least 90% identity, 92%, 94%, 96% or more preferably at least 98% sequence identity thereto.

[0279] Preferably, the portion of Exon 14 of APP, or the allelic variant thereof, is 5′ to the portion of exon 6 of NRG1, or the allelic variant thereof. This orientation at the nucleic acid level results in a fusion polypeptide product that contains an N-terminus of APP and a C-terminus of NRG1. Also, the herein provided APP-NRG1 polynucleotide fusion produces a protein fusion, wherein the part from the N-terminus to the fusion junction is polypeptide sequence from APP and the part from the junction to the C-terminus is NRG1 polypeptide sequence, wherein the NRG1 part also provides its EGF-like domain. The APP-NRG1 fusion protein thereby retains the EGF-like domain of NRG1 and the ability to drive proliferation and survival of a subset of human cancers, in particular an adenocarcinoma, more in particular pancreatic ductal adenocarcinoma.

### WRN-NRG1 Polynucleotide Fusion

[0280] There is also provided a polynucleotide fusion comprising a portion of Exon 33 of WRN fused with a portion of exon 6 of NRG1. Exon 33 of WRN is preferably that of SEQ ID NO: 562, or an allelic variant of SEQ ID NO: 562, and exon 6 of NRG1 is preferably that of SEQ ID NO: 130, or an allelic variant of SEQ ID NO:130.

[0281] When present in an aberrant cell of a patient or subject, said polynucleotide fusion preferably further includes any sequence 5′ from Exon 33 of WRN and any sequence 3′ from exon 6 of NRG1, but to allow detection of the fusion junction using a polynucleotide-based detection assay, it may suffice that at least SEQ ID NOs: 562 and 130 are present. Any sequence 5′ from Exon 33 of WRN comprises or consists of one or all of SEQ ID NOs: 530-561 (or any allelic variant of SEQ ID NOs: 530-561), and any sequence 3′ of exon 6 of NRG1 comprises or consists of one or all of SEQ ID NOs: 131-137 (or any allelic variant of SEQ ID NOs: 131-137).

[0282] Preferably, the allelic variant of Exon 33 of WRN has at least 85% identity to SEQ ID NO: 562, preferably at least 90% identity, 92%, 94%, 96% or more preferably at least 98% sequence identity thereto and the allelic variant of exon 6 of NRG1 has at least 85% identity to SEQ ID NO: 130, preferably at least 90% identity, 92%, 94%, 96% or more preferably at least 98% sequence identity thereto.

[0283] Preferably, the portion of Exon 33 of WRN comprises or is according to SEQ ID NO: 526 and the allelic variant thereof has at least 85% identity to SEQ ID NO: 526, preferably at least 90% identity, 92%, 94%, 96% or more preferably at least 98% sequence identity thereto. The portion of exon 6 of NRG1 in the fusion with WRN preferably is or comprises the sequence according to SEQ ID NO: 527 and the allelic variant thereof has at least 85% identity to SEQ ID NO: 527, preferably at least 90% identity, 92%, 94%, 96% or more preferably at least 98% sequence identity thereto. More preferably, the portion of Exon 33 of WRN comprises or consists of 2 to about 10, about 20, about 30, or up to about 40 or even all contiguous nucleic acids from SEQ ID NO: 526, including at least the nucleic acid of position 96. The number of contiguous nucleic acids may be 2, 3, 4, 5, 6, 7, 8, 9, 10, 11, 12, 13, 14, 15, 16, 17, 18, 19, 20, 21, 22, 23, 24, 25, 26, 27, 28, 29, 30, 31, 32, 33, 34, 35, 36, 37, 38, 39, 40 or all nucleic acids of SEQ ID NO: 526, including at least the nucleic acid of position 96. More preferably, the portion of Exon 33 of WRN comprises or is according to SEQ ID NO: 526, or an allelic variant thereof. Such short polynucleotide sequences are particularly useful for detecting the presence of a larger polynucleotide fusion between WRN and NRG1 and establishing that such a fusion is an in-frame, oncogenic fusion comprising an EGF-like domain of NRG1.

[0284] Alternatively, the portion of Exon 33 of WRN comprises or consists of SEQ ID NO: 562 (or an allelic variant of SEQ ID NO: 562), including at least the nucleic acid of position 163. Preferably, the portion of Exon 33 of WRN comprises or consists of 2 to about 10, about 20, about 30, or up to about 40 or even all contiguous nucleic acids from SEQ ID NO: 562, or from the allelic variant thereof, including at least the nucleic acid of position 163. The number of contiguous nucleic acids may be 2, 3, 4, 5, 6, 7, 8, 9, 10, 11, 12, 13, 14, 15, 16, 17, 18, 19, 20, 21, 22, 23, 24, 25, 26, 27, 28, 29, 30, 31, 32, 33, 34, 35, 36, 37, 38, 39, 40 or all nucleic acids of SEQ ID NO: 562, including at least the nucleic acid of position 163. In this alternative, the portion of Exon 33 of WRN more preferably comprises or is according to SEQ ID NO: 562, or an allelic variant thereof. Preferably, the portion of exon 6 of NRG1 in the fusion with WRN comprises or consists of 2 to about 10, about 20, about 30, or up to about 40 or even all contiguous nucleic acids from SEQ ID NO: 130, or from the allelic variant thereof, including at least the nucleic acid of position 1. The number of contiguous nucleic acids may be 2, 3, 4, 5, 6, 7, 8, 9, 10, 11, 12, 13, 14, 15, 16, 17, 18, 19, 20, 21, 22, 23, 24, 25, 26, 27, 28, 29, 30, 31, 32, 33, 34, 35, 36, 37, 38, 39, 40 or all nucleic acids of SEQ ID NO: 130, including at least the nucleic acid of position 1.

[0285] Preferably, any WRN-NRG1 polynucleotide fusion provided herein is an in-frame fusion of WRN with NRG1. More preferably said fusion is an in frame fusion comprising Exon 33 of WRN, or a portion of Exon 33, with exon 6 of NRG1, or a portion of exon 6 of NRG1. Said in frame fusion is preferably the fusion of SEQ ID NO: 528, or an allelic variant thereof having at least 85% identity thereto, preferably at least 90%, 92%, 94%, 96% or even 98% identity thereto.

[0286] In an alternatively preferred embodiment, the polynucleotide comprising a portion of Exon 33 of WRN fused with a portion of exon 6 of NRG1 comprises 2 to about 10, about 20, about 30, or up to about 40 or even all contiguous nucleic acids from SEQ ID NO: 528, including the nucleic acids at positions 96 and 97. The number of contiguous nucleic acids may be 2, 3, 4, 5, 6, 7, 8, 9, 10, 11, 12, 13, 14, 15, 16, 17, 18, 19, 20, 21, 22, 23, 24, 25, 26, 27, 28, 29, 30, 31, 32, 33, 34, 35, 36, 37, 38, 39, 40 or all nucleic acids of SEQ ID NO: 528, including at least the nucleic acids at positions 96 and 97. SEQ ID NO: 528 includes the junction between WRN and NRG1, in particular the junction is between the nucleic acid at position 96, which stems from WRN and the nucleic acid at position 97 which stems from NRG1. Preferably, the polynucleotide comprising a portion of Exon 33 of WRN fused with a portion of exon 6 of NRG1 has the polynucleotide sequence of SEQ ID NO: 528, or an allelic variant thereof.

[0287] In a preferred embodiment, there is provided a polynucleotide according to SEQ ID NO: 528, or a polynucleotide which comprises about 20, about 30, about 40 or all contiguous nucleic acids from SEQ ID NO: 528, preferably including the nucleic acids at positions 96 and 97. The number of contiguous nucleic acids may be 18, 19, 20, 21, 22, 23, 24, 25, 26, 27, 28, 29, 30, 31, 32, 33, 34, 35, 36, 37, 38, 39, 40 or all nucleic acids of SEQ ID NO: 528, preferably including at least the nucleic acids at positions 96 and 97.

[0288] Preferably, the polynucleotide comprising a portion of Exon 33 of WRN, or an allelic variant thereof, fused with a portion of exon 6 of NRG1, or an allelic variant thereof, is part of a longer polynucleotide that further comprises or encodes an EGF-like domain of NRG1. An aberrant cell comprising the polynucleotide fusion involving WRN or expressing the polypeptide fusion, comprises or encodes an EGF-like domain of NRG1. For quick detection, diagnosis or identification purposes, it may suffice to show that the fusion junction between

[0289] WRN and NRG1 is in-frame and occurs at such a position that the resulting fusion product, nucleic acid or protein, comprises an EGF-like domain of NRG1. Said EGF-like domain is preferably the EGF-like domain according to SEQ ID NO: 163, or an allelic variant thereof having at least 85% identity to SEQ ID NO: 163, preferably at least 90% identity, 92%, 94%, 96% or more preferably at least 98% sequence identity thereto.

[0290] Preferably, the portion of Exon 33 of WRN, or the allelic variant thereof, is 5′ to the portion of exon 6 of NRG1, or the allelic variant thereof. This orientation at the nucleic acid level results in a fusion polypeptide product that contains an N-terminus of WRN and a C-terminus of NRG1. Also, the herein provided WRN-NRG1 polynucleotide fusion produces a protein fusion, wherein the part from the N-terminus to the fusion junction is polypeptide sequence from WRN and the part from the junction to the C-terminus is NRG1 polypeptide sequence, wherein the NRG1 part also provides its EGF-like domain. The WRN-NRG1 fusion protein thereby retains the EGF-like domain of NRG1 and the ability to drive proliferation and survival of a subset of human cancers, in particular a breast cancer.

### DAAM1-NRG1 Polynucleotide Fusion

[0291] In accordance with the present disclosure, there is also provided a polynucleotide comprising a DAAM1 nucleic acid sequence (or a portion of a DAAM1 nucleic acid sequence) fused with an NRG1 nucleic acid sequence (or a portion of an NRG1 nucleic acid sequence). Also included in said fusion are allelic variants of DAAM1 and NRG1 nucleic acid sequences.

[0292] Preferably, the DAAM1 nucleic acid sequence, or the portion thereof, comprises or consists of any one of SEQ ID NOs: 606-631, or an allelic variant of any one of SEQ ID NOs: 606-631, and the NRG1 nucleic acid sequence, or the portion thereof, comprises or consists of any one of SEQ ID NOs: 125-138, or an allelic variant of any one of SEQ ID NOs: 125-138. More preferably, the DAAM1 nucleic acid sequence comprises a portion of SEQ ID NO: 631, or an allelic variant of SEQ ID NO: 631, and the NRG1 nucleic acid sequence preferably comprises a portion of SEQ ID NO: 138, or an allelic variant of SEQ ID NOs: 138. SEQ ID NOs: 606-630 correspond to the individual exons 1-25 of DAAM1 according to NM_001270520.2, respectively. SEQ ID NO: 631 corresponds to exons 1-25 of DAAM1 according to NM_001270520.2. SEQ ID NOs: 125-137 correspond to the individual exons 1-13 of the NRG1 sequence according to NM_001159999.3, respectively. SEQ ID NO: 138 corresponds to exons 1-13 of NRG1 according to NM_001159999.3.

[0293] In a preferred embodiment, the portion of the DAAM1 nucleic acid sequence comprises 2 to about 10, about 20, about 30, or up to about 40 or even all contiguous nucleic acids from any one of SEQ ID NOs: 606-631, or an allelic variant of any one of SEQ ID NOs: 606-631, and the portion of the NRG1 nucleic acid sequence comprises 2 to about 10, about 20, about 30, or up to about 40 or even all contiguous nucleic acids of any one of SEQ ID NOs: 125-138, or an allelic variant of any one of SEQ ID NOs: 125-138.

[0294] Preferably, the allelic variant of the DAAM1 nucleic acid sequences has at least 85% identity to any one of SEQ ID NOs: 606-631, preferably at least 90% identity, 92%, 94%, 96% or more preferably at least 98% sequence identity thereto; and the allelic variant of the NRG1 nucleic acid sequences has at least 85% identity to any one of SEQ ID NOs: 125-138, preferably at least 90% identity, 92%, 94%, 96% or more preferably at least 98% sequence identity thereto.

[0295] Preferably, the DAAM1 nucleic acid sequence, or the portion thereof, is 5′ to the NRG1 nucleic acid sequence, or the portion thereof.

[0296] Preferably, the polynucleotide comprising a DAAM1 nucleic acid sequence of DAAM1, or a portion of said sequence, fused with a NRG1 nucleic acid sequence, or portion of said sequence, comprises or encodes an EGF-like domain of NRG1. An aberrant cell comprising the DAAM1-NRG1 polynucleotide fusion, comprises or encodes an EGF-like domain of NRG1. For detection, diagnosis or identification purposes, it may suffice to show that the fusion junction between DAAM1 and NRG1 is in-frame and occurs at a position such that the resulting fusion nucleic acid codes for an EGF-like domain of NRG1. Said EGF-like domain is preferably the EGF-like domain according to SEQ ID NO: 163, or an allelic variant thereof having at least 85% identity to SEQ ID NO: 163, preferably at least 90% identity, 92%, 94%, 96% or more preferably at least 98% sequence identity thereto.

[0297] There is also provided a polynucleotide fusion comprising a portion of Exon 1 of DAAM1 fused with a portion of exon 1 of NRG1. Exon 1 of DAAM1 is preferably that of SEQ ID NO: 606, or an allelic variant of SEQ ID NO: 606, and exon 1 of NRG1 is preferably that of SEQ ID NO: 125, or an allelic variant of SEQ ID NO: 125.

[0298] When present in an aberrant cell of a patient or subject, said polynucleotide fusion preferably further includes any sequence 5′ from Exon 1 of DAAM1 and any sequence 3′ from exon 1 of NRG1, but to allow detection of the fusion junction using a polynucleotide-based detection assay, it may suffice that at least SEQ ID NOs: 606 and 125 are present. Any sequence 5′ from Exon 1 of DAAM1 comprises or consists of SEQ ID NOs: 606 (or any allelic variant of SEQ ID NOs: 606), and any sequence 3′ of exon 1 of NRG1 comprises or consists of one or all of SEQ ID NOs: 126-137 (or any allelic variant of SEQ ID NOs: 126-137).

[0299] Preferably, the allelic variant of Exon 1 of DAAM1 has at least 85% identity to SEQ ID NO: 606, preferably at least 90% identity, 92%, 94%, 96% or more preferably at least 98% sequence identity thereto and the allelic variant of exon 1 of NRG1 has at least 85% identity to SEQ ID NO: 125, preferably at least 90% identity, 92%, 94%, 96% or more preferably at least 98% sequence identity thereto.

[0300] Preferably, the portion of Exon 1 of DAAM1 comprises or is according to SEQ ID NO: 603 and the allelic variant thereof has at least 85% identity to SEQ ID NO: 603, preferably at least 90% identity, 92%, 94%, 96% or more preferably at least 98% sequence identity thereto. The portion of exon 1 of NRG1 in the fusion with DAAM1 preferably is or comprises the sequence according to SEQ ID NO: 604 and the allelic variant thereof has at least 85% identity to SEQ ID NO: 604, preferably at least 90% identity, 92%, 94%, 96% or more preferably at least 98% sequence identity thereto. More preferably, the portion of Exon 1 of DAAM1 comprises or consists of 2 to about 10, about 20, about 30, or up to about 40 or even all contiguous nucleic acids from SEQ ID NO: 603, including at least the nucleic acid of position 75. The number of contiguous nucleic acids may be 2, 3, 4, 5, 6, 7, 8, 9, 10, 11, 12, 13, 14, 15, 16, 17, 18, 19, 20, 21, 22, 23, 24, 25, 26, 27, 28, 29, 30, 31, 32, 33, 34, 35, 36, 37, 38, 39, 40 or all nucleic acids of SEQ ID NO: 603, including at least the nucleic acid of position 75. More preferably, the portion of Exon 1 of DAAM1 comprises or is according to SEQ ID NO: 603, or an allelic variant thereof. Such short polynucleotide sequences are particularly useful for detecting the presence of a larger polynucleotide fusion between DAAM1 and NRG1 and establishing that such a fusion is an in-frame, oncogenic fusion comprising an EGF-like domain of NRG1.

[0301] Alternatively, the portion of Exon 1 of DAAM1 comprises or consists of SEQ ID NO: 606 (or an allelic variant of SEQ ID NO: 606), including at least the nucleic acid of position 102. Preferably, the portion of Exon 1 of DAAM1 comprises or consists of 2 to about 10, about 20, about 30, or up to about 40 or even all contiguous nucleic acids from SEQ ID NO: 606, or from the allelic variant thereof, including at least the nucleic acid of position 102. The number of contiguous nucleic acids may be 2, 3, 4, 5, 6, 7, 8, 9, 10, 11, 12, 13, 14, 15, 16, 17, 18, 19, 20, 21, 22, 23, 24, 25, 26, 27, 28, 29, 30, 31, 32, 33, 34, 35, 36, 37, 38, 39, 40 or all nucleic acids of SEQ ID NO: 606, including at least the nucleic acid of position 102. In this alternative, the portion of Exon 1 of DAAM1 more preferably comprises or is according to SEQ ID NO: 606, or an allelic variant thereof. Preferably, the portion of exon 1 of NRG1 in the fusion with DAAM1 comprises or consists of 2 to about 10, about 20, about 30, or up to about 40 or even all contiguous nucleic acids from SEQ ID NO: 125, or from the allelic variant thereof, including at least the nucleic acid of position 1. The number of contiguous nucleic acids may be 2, 3, 4, 5, 6, 7, 8, 9, 10, 11, 12, 13, 14, 15, 16, 17, 18, 19, 20, 21, 22, 23, 24, 25, 26, 27, 28, 29, 30, 31, 32, 33, 34, 35, 36, 37, 38, 39, 40 or all nucleic acids of SEQ ID NO: 125, including at least the nucleic acid of position 1.

[0302] In an alternatively preferred embodiment, the polynucleotide comprising a portion of Exon 1 of DAAM1 fused with a portion of exon 1 of NRG1 comprises 2 to about 10, about 20, about 30, or up to about 40 or even all contiguous nucleic acids from SEQ ID NO: 605, including the nucleic acids at positions 75 and 76. The number of contiguous nucleic acids may be 2, 3, 4, 5, 6, 7, 8, 9, 10, 11, 12, 13, 14, 15, 16, 17, 18, 19, 20, 21, 22, 23, 24, 25, 26, 27, 28, 29, 30, 31, 32, 33, 34, 35, 36, 37, 38, 39, 40 or all nucleic acids of SEQ ID NO: 605, including at least the nucleic acids at positions 75 and 76. SEQ ID NO: 605 includes the junction between DAAM1 and NRG1, in particular the junction is between the nucleic acid at position 75, which stems from DAAM1 and the nucleic acid at position 76 which stems from NRG1. Preferably, the polynucleotide comprising a portion of Exon 1 of DAAM1 fused with a portion of exon 1 of NRG1 has the polynucleotide sequence of SEQ ID NO: 605, or an allelic variant thereof.

[0303] Preferably, any DAAM1-NRG1 polynucleotide fusion provided herein is a fusion of a portion of the untranslated region of DAAM1 with a portion of the untranslated region of NRG1. More preferably said fusion is a fusion comprising exon 1 of DAAM1, or a portion of exon 1, with exon 1 of NRG1, or a portion of exon 1 of NRG1. Said fusion is preferably the fusion of SEQ ID NO: 605, or an allelic variant thereof having at least 85% identity thereto, preferably at least 90%, 92%, 94%, 96% or even 98% identity thereto.

[0304] Preferably, the portion of exon 1 of DAAM1, or the allelic variant thereof, is 5′ to the portion of exon 1 of NRG1, or the allelic variant thereof. The NRG1 protein thereby has become positioned downstream of the DAAM1 promoter and is expected to have become transcriptionally controlled by said promoter. The resulting fusion thus results in expression of a non-protein fused NRG1 protein and thus contains the EGF-like domain. Therewith, the ability to drive proliferation and survival of a subset of human cancers, in particular breast cancer.

### ASPH-NRG1 Polynucleotide Fusion

[0305] In accordance with the present disclosure, there is also provided a polynucleotide comprising a ASPH nucleic acid sequence (or a portion of a ASPH nucleic acid sequence) fused with an NRG1 nucleic acid sequence (or a portion of an NRG1 nucleic acid sequence). Also included in said fusion are allelic variants of ASPH and NRG1 nucleic acid sequences.

[0306] Preferably, the ASPH nucleic acid sequence, or the portion thereof, comprises or consists of any one of SEQ ID NOs: 637-662, or an allelic variant of any one of SEQ ID NOs: 637-662, and the NRG1 nucleic acid sequence, or the portion thereof, comprises or consists of any one of SEQ ID NOs: 125-138, or an allelic variant of any one of SEQ ID NOs: 125-138. More preferably, the ASPH nucleic acid sequence comprises a portion of SEQ ID NOs: 662, or an allelic variant of SEQ ID NOs: 662, and the NRG1 nucleic acid sequence preferably comprises a portion of SEQ ID NOs: 138, or an allelic variant of SEQ ID NOs: 138. SEQ ID NOs: 637-661 correspond to the individual exons 1-25 of ASPH according to NM_001164750.2, respectively. SEQ ID NO: 662 corresponds to exons 1-25 of ASPH according to NM_001164750.2. SEQ ID NOs: 125-137 correspond to the individual exons 1-13 of the NRG1 sequence according to NM_001159999.3, respectively. SEQ ID NO: 138 corresponds to exons 1-13 of NRG1 according to NM_001159999.3.

[0307] In a preferred embodiment, the portion of the ASPH nucleic acid sequence comprises 2 to about 10, about 20, about 30, or up to about 40 or even all contiguous nucleic acids from any one of SEQ ID NOs: 637-662, or an allelic variant of any one of SEQ ID NOs: 637-662, and the portion of the NRG1 nucleic acid sequence comprises 2 to about 10, about 20, about 30, or up to about 40 or even all contiguous nucleic acids of any one of SEQ ID NOs: 125-138, or an allelic variant of any one of SEQ ID NOs: 125-138.

[0308] Preferably, the allelic variant of the ASPH nucleic acid sequences has at least 85% identity to any one of SEQ ID NOs: 637-662, preferably at least 90% identity, 92%, 94%, 96% or more preferably at least 98% sequence identity thereto; and the allelic variant of the NRG1 nucleic acid sequences has at least 85% identity to any one of SEQ ID NOs: 125-138, preferably at least 90% identity, 92%, 94%, 96% or more preferably at least 98% sequence identity thereto.

[0309] Preferably, the ASPH nucleic acid sequence, or the portion thereof, is 5′ to the NRG1 nucleic acid sequence, or the portion thereof.

[0310] Preferably, the polynucleotide comprising a ASPH nucleic acid sequence of ASPH, or a portion of said sequence, fused with a NRG1 nucleic acid sequence, or portion of said sequence, comprises or encodes an EGF-like domain of NRG1. An aberrant cell comprising the ASPH-NRG1 polynucleotide fusion or expressing the polypeptide fusion, comprises or encodes an EGF-like domain of NRG1. For detection, diagnosis or identification purposes, it may suffice to show that the fusion junction between ASPH and NRG1 is in-frame and occurs at a position such that the resulting fusion product, nucleic acid or protein, comprises an EGF-like domain of NRG1. Said EGF-like domain is preferably the EGF-like domain according to SEQ ID NO: 163, or an allelic variant thereof having at least 85% identity to SEQ ID NO: 163, preferably at least 90% identity, 92%, 94%, 96% or more preferably at least 98% sequence identity thereto.

[0311] There is also provided a polynucleotide fusion comprising a portion of Exon 22 of ASPH fused with a portion of exon 2 of NRG1. Exon 22 of ASPH is preferably that of SEQ ID NO: 658, or an allelic variant of SEQ ID NO: 658, and exon 2 of NRG1 is preferably that of SEQ ID NO: 126, or an allelic variant of SEQ ID NO: 126.

[0312] When present in an aberrant cell of a patient or subject, said polynucleotide fusion preferably further includes any sequence 5′ from Exon 22 of ASPH and any sequence 3′ from exon 2 of NRG1, but to allow detection of the fusion junction using a polynucleotide-based detection assay, it may suffice that at least SEQ ID NOs: 658 and 126 are present. Any sequence 5′ from Exon 22 of ASPH comprises or consists of one or all of SEQ ID NOs: 637-657 (or any allelic variant of SEQ ID NOs: 637-657), and any sequence 3′ of exon 2 of NRG1 comprises or consists of one or all of SEQ ID NOs: 127-137 (or any allelic variant of SEQ ID NOs: 127-137).

[0313] Preferably, the allelic variant of Exon 22 of ASPH has at least 85% identity to SEQ ID NO: 658, preferably at least 90% identity, 92%, 94%, 96% or more preferably at least 98% sequence identity thereto and the allelic variant of exon 2 of NRG1 has at least 85% identity to SEQ ID NO: 126, preferably at least 90% identity, 92%, 94%, 96% or more preferably at least 98% sequence identity thereto.

[0314] Preferably, the portion of Exon 22 of ASPH comprises or is according to SEQ ID NO: 633 and the allelic variant thereof has at least 85% identity to SEQ ID NO: 633, preferably at least 90% identity, 92%, 94%, 96% or more preferably at least 98% sequence identity thereto. The portion of exon 2 of NRG1 in the fusion with ASPH preferably is or comprises the sequence according to SEQ ID NO: 634 and the allelic variant thereof has at least 85% identity to SEQ ID NO: 634, preferably at least 90% identity, 92%, 94%, 96% or more preferably at least 98% sequence identity thereto. More preferably, the portion of Exon 22 of ASPH comprises or consists of 2 to about 10, about 20, about 30, or up to about 40 or even all contiguous nucleic acids from SEQ ID NO: 633, including at least the nucleic acid of position 75. The number of contiguous nucleic acids may be 2, 3, 4, 5, 6, 7, 8, 9, 10, 11, 12, 13, 14, 15, 16, 17, 18, 19, 20, 21, 22, 23, 24, 25, 26, 27, 28, 29, 30, 31, 32, 33, 34, 35, 36, 37, 38, 39, 40 or all nucleic acids of SEQ ID NO: 633, including at least the nucleic acid of position 75. More preferably, the portion of Exon 22 of ASPH comprises or is according to SEQ ID NO: 633, or an allelic variant thereof. Such short polynucleotide sequences are particularly useful for detecting the presence of a larger polynucleotide fusion between ASPH and NRG1 and establishing that such a fusion is an in-frame, oncogenic fusion comprising an EGF-like domain of NRG1.

[0315] Alternatively, the portion of Exon 22 of ASPH comprises or consists of SEQ ID NO: 658 (or an allelic variant of SEQ ID NO: 658), including at least the nucleic acid of position 136. Preferably, the portion of Exon 22 of ASPH comprises or consists of 2 to about 10, about 20, about 30, or up to about 40 or even all contiguous nucleic acids from SEQ ID NO: 658, or from the allelic variant thereof, including at least the nucleic acid of position 136. The number of contiguous nucleic acids may be 2, 3, 4, 5, 6, 7, 8, 9, 10, 11, 12, 13, 14, 15, 16, 17, 18, 19, 20, 21, 22, 23, 24, 25, 26, 27, 28, 29, 30, 31, 32, 33, 34, 35, 36, 37, 38, 39, 40 or all nucleic acids of SEQ ID NO: 658, including at least the nucleic acid of position 136. In this alternative, the portion of Exon 22 of ASPH more preferably comprises or is according to SEQ ID NO: 658, or an allelic variant thereof. Preferably, the portion of exon 2 of NRG1 in the fusion with ASPH comprises or consists of 2 to about 10, about 20, about 30, or up to about 40 or even all contiguous nucleic acids from SEQ ID NO: 126, or from the allelic variant thereof, including at least the nucleic acid of position 1. The number of contiguous nucleic acids may be 2, 3, 4, 5, 6, 7, 8, 9, 10, 11, 12, 13, 14, 15, 16, 17, 18, 19, 20, 21, 22, 23, 24, 25, 26, 27, 28, 29, 30, 31, 32, 33, 34, 35, 36, 37, 38, 39, 40 or all nucleic acids of SEQ ID NO: 126, including at least the nucleic acid of position 1.

[0316] In an alternatively preferred embodiment, the polynucleotide comprising a portion of Exon 22 of ASPH fused with a portion of exon 2 of NRG1 comprises 2 to about 10, about 20, about 30, or up to about 40 or even all contiguous nucleic acids from SEQ ID NO: 635, including the nucleic acids at positions 75 and 76. The number of contiguous nucleic acids may be 2, 3, 4, 5, 6, 7, 8, 9, 10, 11, 12, 13, 14, 15, 16, 17, 18, 19, 20, 21, 22, 23, 24, 25, 26, 27, 28, 29, 30, 31, 32, 33, 34, 35, 36, 37, 38, 39, 40 or all nucleic acids of SEQ ID NO: 635, including at least the nucleic acids at positions 75 and 76. SEQ ID NO: 635 includes the junction between ASPH and NRG1, in particular the junction is between the nucleic acid at position 75, which stems from ASPH and the nucleic acid at position 76 which stems from NRG1. Preferably, the polynucleotide comprising a portion of Exon 22 of ASPH fused with a portion of exon 2 of NRG1 has the polynucleotide sequence of SEQ ID NO: 635, or an allelic variant thereof.

[0317] Preferably, any ASPH-NRG1 polynucleotide fusion provided herein is an in-frame fusion of ASPH with NRG1. More preferably said fusion is an in-frame fusion comprising Exon 22 of ASPH, or a portion of Exon 22, with exon 2 of NRG1, or a portion of exon 2 of NRG1. Said in-frame fusion is preferably the fusion of SEQ ID NO: 635, or an allelic variant thereof having at least 85% identity thereto, preferably at least 90%, 92%, 94%, 96% or even 98% identity thereto.

[0318] Preferably, the portion of Exon 22 of ASPH, or the allelic variant thereof, is 5′ to the portion of exon 2 of NRG1, or the allelic variant thereof. This orientation at the nucleic acid level results in a fusion polypeptide product that contains an N-terminus of ASPH and a C-terminus of NRG1. Also, the herein provided ASPH-NRG1 polynucleotide fusion produces a protein fusion, wherein the part from the N-terminus to the fusion junction is polypeptide sequence from ASPH and the part from the junction to the C-terminus is NRG1 polypeptide sequence, wherein the NRG1 part also provides its EGF-like domain. The ASPH-NRG1 fusion protein thereby retains the EGF-like domain of NRG1 and the ability to drive proliferation and survival of a subset of human cancers, in particular an adenocarcinoma, more in particular colorectal adenocarcinoma.

### NOTCH2-NRG1 Polynucleotide Fusion

[0319] There is also provided a polynucleotide fusion comprising a portion of Exon 6 of NOTCH2 fused with a portion of exon 6 of NRG1. Exon 6 of NOTCH2 is preferably that of SEQ ID NO: 700, or an allelic variant of SEQ ID NO: 700, and exon 6 of NRG1 is preferably that of SEQ ID NO: 130, or an allelic variant of SEQ ID NO:130.

[0320] When present in an aberrant cell of a patient or subject, said polynucleotide fusion preferably further includes any sequence 5′ from Exon 6 of NOTCH2 and any sequence 3′ from exon 6 of NRG1, but to allow detection of the fusion junction using a polynucleotide-based detection assay, it may suffice that at least SEQ ID NOs: 700 and 130 are present. Any sequence 5′ from Exon 6 of NOTCH2 comprises or consists of one or all of SEQ ID NOs: 695-699 (or any allelic variant of SEQ ID NOs: 695-699), and any sequence 3′ of exon 6 of NRG1 comprises or consists of one or all of SEQ ID NOs: 131-137 (or any allelic variant of SEQ ID NOs: 131-137).

[0321] Preferably, the allelic variant of Exon 6 of NOTCH2 has at least 85% identity to SEQ ID NO: 700, preferably at least 90% identity, 92%, 94%, 96% or more preferably at least 98% sequence identity thereto and the allelic variant of exon 6 of NRG1 has at least 85% identity to SEQ ID NO: 130, preferably at least 90% identity, 92%, 94%, 96% or more preferably at least 98% sequence identity thereto.

[0322] Preferably, the portion of Exon 6 of NOTCH2 comprises or is according to SEQ ID NO: 691 and the allelic variant thereof has at least 85% identity to SEQ ID NO: 691, preferably at least 90% identity, 92%, 94%, 96% or more preferably at least 98% sequence identity thereto. The portion of exon 6 of NRG1 in the fusion with NOTCH2 preferably is or comprises the sequence according to SEQ ID NO: 692 and the allelic variant thereof has at least 85% identity to SEQ ID NO: 692, preferably at least 90% identity, 92%, 94%, 96% or more preferably at least 98% sequence identity thereto. More preferably, the portion of Exon 6 of NOTCH2 comprises or consists of 2 to about 10, about 20, about 30, or up to about 40 or even all contiguous nucleic acids from SEQ ID NO: 691, including at least the nucleic acid of position 75. The number of contiguous nucleic acids may be 2, 3, 4, 5, 6, 7, 8, 9, 10, 11, 12, 13, 14, 15, 16, 17, 18, 19, 20, 21, 22, 23, 24, 25, 26, 27, 28, 29, 30, 31, 32, 33, 34, 35, 36, 37, 38, 39, 40 or all nucleic acids of SEQ ID NO: 691, including at least the nucleic acid of position 75. More preferably, the portion of Exon 6 of NOTCH2 comprises or is according to SEQ ID NO: 691, or an allelic variant thereof. Such short polynucleotide sequences are particularly useful for detecting the presence of a larger polynucleotide fusion between NOTCH2 and NRG1 and establishing that such a fusion is an in frame, oncogenic fusion comprising an EGF-like domain of NRG1.

[0323] Alternatively, the portion of Exon 6 of NOTCH2 comprises or consists of SEQ ID NO: 700 (or an allelic variant of SEQ ID NO: 700), including at least the nucleic acid of position 234. Preferably, the portion of Exon 6 of NOTCH2 comprises or consists of 2 to about 10, about 20, about 30, or up to about 40 or even all contiguous nucleic acids from SEQ ID NO: 700, or from the allelic variant thereof, including at least the nucleic acid of position 234. The number of contiguous nucleic acids may be 2, 3, 4, 5, 6, 7, 8, 9, 10, 11, 12, 13, 14, 15, 16, 17, 18, 19, 20, 21, 22, 23, 24, 25, 26, 27, 28, 29, 30, 31, 32, 33, 34, 35, 36, 37, 38, 39, 40 or all nucleic acids of SEQ ID NO: 700, including at least the nucleic acid of position 234. In this alternative, the portion of Exon 6 of NOTCH2 more preferably comprises or is according to SEQ ID NO: 700, or an allelic variant thereof. Preferably, the portion of exon 6 of NRG1 in the fusion with NOTCH2 comprises or consists of 2 to about 10, about 20, about 30, or up to about 40 or even all contiguous nucleic acids from SEQ ID NO: 130, or from the allelic variant thereof, including at least the nucleic acid of position 1. The number of contiguous nucleic acids may be 2, 3, 4, 5, 6, 7, 8, 9, 10, 11, 12, 13, 14, 15, 16, 17, 18, 19, 20, 21, 22, 23, 24, 25, 26, 27, 28, 29, 30, 31, 32, 33, 34, 35, 36, 37, 38, 39, 40 or all nucleic acids of SEQ ID NO: 130, including at least the nucleic acid of position 1.

[0324] Preferably, any NOTCH2-NRG1 polynucleotide fusion provided herein is an in-frame fusion of NOTCH2 with NRG1. More preferably said fusion is an in-frame fusion comprising Exon 6 of NOTCH2, or a portion of Exon 6, with exon 6 of NRG1, or a portion of exon 6 of NRG1. Said in frame fusion is preferably the fusion of SEQ ID NO: 693, or an allelic variant thereof having at least 85% identity thereto, preferably at least 90%, 92%, 94%, 96% or even 98% identity thereto.

[0325] In an alternatively preferred embodiment, the polynucleotide comprising a portion of Exon 6 of NOTCH2 fused with a portion of exon 6 of NRG1 comprises 2 to about 10, about 20, about 30, or up to about 40 or even all contiguous nucleic acids from SEQ ID NO: 693, including the nucleic acids at positions 75 and 76. The number of contiguous nucleic acids may be 2, 3, 4, 5, 6, 7, 8, 9, 10, 11, 12, 13, 14, 15, 16, 17, 18, 19, 20, 21, 22, 23, 24, 25, 26, 27, 28, 29, 30, 31, 32, 33, 34, 35, 36, 37, 38, 39, 40 or all nucleic acids of SEQ ID NO: 693, including at least the nucleic acids at positions 75 and 76. SEQ ID NO: 693 includes the junction between NOTCH2 and NRG1, in particular the junction is between the nucleic acid at position 75, which stems from NOTCH2 and the nucleic acid at position 76 which stems from NRG1. Preferably, the polynucleotide comprising a portion of Exon 6 of NOTCH2 fused with a portion of exon 6 of NRG1 has the polynucleotide sequence of SEQ ID NO: 693, or an allelic variant thereof.

[0326] In a preferred embodiment, there is provided a polynucleotide according to SEQ ID NO: 693, or a polynucleotide which comprises about 20, about 30, about 40 or all contiguous nucleic acids from SEQ ID NO: 693, preferably including the nucleic acids at positions 75 and 76. The number of contiguous nucleic acids may be 18, 19, 20, 21, 22, 23, 24, 25, 26, 27, 28, 29, 30, 31, 32, 33, 34, 35, 36, 37, 38, 39, 40 or all nucleic acids of SEQ ID NO: 693, preferably including at least the nucleic acids at positions 75 and 76.

[0327] Preferably, the polynucleotide comprising a portion of Exon 6 of NOTCH2, or an allelic variant thereof, fused with a portion of exon 6 of NRG1, or an allelic variant thereof, is part of a longer polynucleotide that further comprises or encodes an EGF-like domain of NRG1. An aberrant cell comprising the polynucleotide fusion involving NOTCH2 or expressing the polypeptide fusion, comprises or encodes an EGF-like domain of NRG1. For quick detection, diagnosis or identification purposes, it may suffice to show that the fusion junction between NOTCH2 and NRG1 is in-frame and occurs at such a position that the resulting fusion product, nucleic acid or protein, comprises an EGF-like domain of NRG1. Said EGF-like domain is preferably the EGF-like domain according to SEQ ID NO: 163, or an allelic variant thereof having at least 85% identity to SEQ ID NO: 163, preferably at least 90% identity, 92%, 94%, 96% or more preferably at least 98% sequence identity thereto.

[0328] Preferably, the portion of Exon 6 of NOTCH2, or the allelic variant thereof, is 5′ to the portion of exon 6 of NRG1, or the allelic variant thereof. This orientation at the nucleic acid level results in a fusion polypeptide product that contains an N-terminus of NOTCH2 and a C-terminus of NRG1. Also, the herein provided NOTCH2-NRG1 polynucleotide fusion produces a protein fusion, wherein the part from the N-terminus to the fusion junction is polypeptide sequence from NOTCH2 and the part from the junction to the C-terminus is NRG1 polypeptide sequence, wherein the NRG1 part also provides its EGF-like domain. The NOTCH2-NRG1 fusion protein thereby retains the EGF-like domain of NRG1 and the ability to drive proliferation and survival of a subset of human cancers, in particular an adenocarcinoma, more in particular pancreatic ductal adenocarcinoma.

### CD74-NRG1 Polynucleotide Fusion

[0329] There is also provided a polynucleotide fusion comprising a portion of Exon 2 of CD74 fused with a portion of exon 2 of NRG1. Exon 2 of CD74 is preferably that of SEQ ID NO: 720, or an allelic variant of SEQ ID NO: 720, and exon 2 of NRG1 is preferably that of SEQ ID NO: 126, or an allelic variant of SEQ ID NO:126.

[0330] When present in an aberrant cell of a patient or subject, said polynucleotide fusion preferably further includes any sequence 5′ from Exon 2 of CD74 and any sequence 3′ from exon 2 of NRG1, but to allow detection of the fusion junction using a polynucleotide-based detection assay, it may suffice that at least SEQ ID NOs: 720 and 126 are present. Any sequence 5′ from Exon 2 of CD74 comprises or consists of SEQ ID NO: 719 (or any allelic variant of SEQ ID NO: 719), and any sequence 3′ of exon 2 of NRG1 comprises or consists of one or all of SEQ ID NOs: 127-137 (or any allelic variant of SEQ ID NOs: 127-137).

[0331] Preferably, the allelic variant of Exon 2 of CD74 has at least 85% identity to SEQ ID NO: 720, preferably at least 90% identity, 92%, 94%, 96% or more preferably at least 98% sequence identity thereto and the allelic variant of exon 2 of NRG1 has at least 85% identity to SEQ ID NO: 126, preferably at least 90% identity, 92%, 94%, 96% or more preferably at least 98% sequence identity thereto.

[0332] Preferably, the portion of Exon 2 of CD74 comprises or is according to SEQ ID NO: 715 and the allelic variant thereof has at least 85% identity to SEQ ID NO: 715, preferably at least 90% identity, 92%, 94%, 96% or more preferably at least 98% sequence identity thereto. The portion of exon 2 of NRG1 in the fusion with CD74 preferably is or comprises the sequence according to SEQ ID NO: 716 and the allelic variant thereof has at least 85% identity to SEQ ID NO: 716, preferably at least 90% identity, 92%, 94%, 96% or more preferably at least 98% sequence identity thereto. More preferably, the portion of Exon 2 of CD74 comprises or consists of 2 to about 10, about 20, about 30, or up to about 40 or even all contiguous nucleic acids from SEQ ID NO: 715, including at least the nucleic acid of position 75. The number of contiguous nucleic acids may be 2, 3, 4, 5, 6, 7, 8, 9, 10, 11, 12, 13, 14, 15, 16, 17, 18, 19, 20, 21, 22, 23, 24, 25, 26, 27, 28, 29, 30, 31, 32, 33, 34, 35, 36, 37, 38, 39, 40 or all nucleic acids of SEQ ID NO: 715, including at least the nucleic acid of position 75. More preferably, the portion of Exon 2 of CD74 comprises or is according to SEQ ID NO: 715, or an allelic variant thereof. Such short polynucleotide sequences are particularly useful for detecting the presence of a larger polynucleotide fusion between CD74 and NRG1 and establishing that such a fusion is an in-frame, oncogenic fusion comprising an EGF-like domain of NRG1.

[0333] Alternatively, the portion of Exon 2 of CD74 comprises or consists of SEQ ID NO: 720 (or an allelic variant of SEQ ID NO: 720), including at least the nucleic acid of position 173. Preferably, the portion of Exon 2 of CD74 comprises or consists of 2 to about 10, about 20, about 30, or up to about 40 or even all contiguous nucleic acids from SEQ ID NO: 720, or from the allelic variant thereof, including at least the nucleic acid of position 173. The number of contiguous nucleic acids may be 2, 3, 4, 5, 6, 7, 8, 9, 10, 11, 12, 13, 14, 15, 16, 17, 18, 19, 20, 21, 22, 23, 24, 25, 26, 27, 28, 29, 30, 31, 32, 33, 34, 35, 36, 37, 38, 39, 40 or all nucleic acids of SEQ ID NO: 720, including at least the nucleic acid of position 173. In this alternative, the portion of Exon 2 of CD74 more preferably comprises or is according to SEQ ID NO: 720, or an allelic variant thereof. Preferably, the portion of exon 2 of NRG1 in the fusion with CD74 comprises or consists of 2 to about 10, about 20, about 30, or up to about 40 or even all contiguous nucleic acids from SEQ ID NO: 126, or from the allelic variant thereof, including at least the nucleic acid of position 1. The number of contiguous nucleic acids may be 2, 3, 4, 5, 6, 7, 8, 9, 10, 11, 12, 13, 14, 15, 16, 17, 18, 19, 20, 21, 22, 23, 24, 25, 26, 27, 28, 29, 30, 31, 32, 33, 34, 35, 36, 37, 38, 39, 40 or all nucleic acids of SEQ ID NO: 126, including at least the nucleic acid of position 1.

[0334] Preferably, any CD74-NRG1 polynucleotide fusion provided herein is an in-frame fusion of CD74 with NRG1. More preferably said fusion is an in-frame fusion comprising Exon 2 of CD74, or a portion of Exon 2, with exon 2 of NRG1, or a portion of exon 2 of NRG1. Said in-frame fusion is preferably the fusion of SEQ ID NO: 717, or an allelic variant thereof having at least 85% identity thereto, preferably at least 90%, 92%, 94%, 96% or even 98% identity thereto.

[0335] In an alternatively preferred embodiment, the polynucleotide comprising a portion of Exon 2 of CD74 fused with a portion of exon 2 of NRG1 comprises 2 to about 10, about 20, about 30, or up to about 40 or even all contiguous nucleic acids from SEQ ID NO: 717, including the nucleic acids at positions 75 and 76. The number of contiguous nucleic acids may be 2, 3, 4, 5, 6, 7, 8, 9, 10, 11, 12, 13, 14, 15, 16, 17, 18, 19, 20, 21, 22, 23, 24, 25, 26, 27, 28, 29, 30, 31, 32, 33, 34, 35, 36, 37, 38, 39, 40 or all nucleic acids of SEQ ID NO: 717, including at least the nucleic acids at positions 75 and 76. SEQ ID NO: 717 includes the junction between CD74 and NRG1, in particular the junction is between the nucleic acid at position 75, which stems from CD74 and the nucleic acid at position 76 which stems from NRG1. Preferably, the polynucleotide comprising a portion of Exon 2 of CD74 fused with a portion of exon 2 of NRG1 has the polynucleotide sequence of SEQ ID NO: 717, or an allelic variant thereof.

[0336] In a preferred embodiment, there is provided a polynucleotide according to SEQ ID NO: 717, or a polynucleotide which comprises about 20, about 30, about 40 or all contiguous nucleic acids from SEQ ID NO: 717, preferably including the nucleic acids at positions 75 and 76. The number of contiguous nucleic acids may be 18, 19, 20, 21, 22, 23, 24, 25, 26, 27, 28, 29, 30, 31, 32, 33, 34, 35, 36, 37, 38, 39, 40 or all nucleic acids of SEQ ID NO: 717, preferably including at least the nucleic acids at positions 75 and 76.

[0337] Preferably, the polynucleotide comprising a portion of Exon 2 of CD74, or an allelic variant thereof, fused with a portion of exon 2 of NRG1, or an allelic variant thereof, is part of a longer polynucleotide that further comprises or encodes an EGF-like domain of NRG1. An aberrant cell comprising the polynucleotide fusion involving CD74 or expressing the polypeptide fusion, comprises or encodes an EGF-like domain of NRG1. For quick detection, diagnosis or identification purposes, it may suffice to show that the fusion junction between CD74 and NRG1 is in-frame and occurs at such a position that the resulting fusion product, nucleic acid or protein, comprises an EGF-like domain of NRG1. Said EGF-like domain is preferably the EGF-like domain according to SEQ ID NO: 163, or an allelic variant thereof having at least 85% identity to SEQ ID NO: 163, preferably at least 90% identity, 92%, 94%, 96% or more preferably at least 98% sequence identity thereto.

[0338] Preferably, the portion of Exon 2 of CD74, or the allelic variant thereof, is 5′ to the portion of exon 2 of NRG1, or the allelic variant thereof. This orientation at the nucleic acid level results in a fusion polypeptide product that contains an N-terminus of CD74 and a C-terminus of NRG1. Also, the herein provided CD74-NRG1 polynucleotide fusion produces a protein fusion, wherein the part from the N-terminus to the fusion junction is polypeptide sequence from CD74 and the part from the junction to the C-terminus is NRG1 polypeptide sequence, wherein the NRG1 part also provides its EGF-like domain. The CD74-NRG1 fusion protein thereby retains the EGF-like domain of NRG1 and the ability to drive proliferation and survival of a subset of human cancers, in particular lung cancer.

### SDC4-NRG1 Polynucleotide Fusion

[0339] There is also provided a polynucleotide fusion comprising a portion of Exon 2 of SDC4 fused with a portion of exon 2 of NRG1. Exon 2 of said SDC4 is preferably that of SEQ ID NO: 746, or an allelic variant of SEQ ID NO: 746, and exon 2 of NRG1 is preferably that of SEQ ID NO: 126, or an allelic variant of SEQ ID NO: 126.

[0340] Preferably, the allelic variant of Exon 2 of said SDC4 has at least 85% identity to SEQ ID NO: 746, preferably at least 90% identity, 92%, 94%, 96% or more preferably at least 98% sequence identity thereto and the allelic variant of exon 2 of NRG1 has at least 85% identity to SEQ ID NO: 126, preferably at least 90% identity, 92%, 94%, 96% or more preferably at least 98% sequence identity thereto.

[0341] Preferably, the portion of Exon 2 of said SDC4 comprises or is according to SEQ ID NO: 741 and the allelic variant thereof has at least 85% identity to SEQ ID NO: 741, preferably at least 90% identity, 92%, 94%, 96% or more preferably at least 98% sequence identity thereto. The portion of exon 2 of NRG1 in the fusion with SDC4 preferably is or comprises the sequence according to SEQ ID NO: 742 and the allelic variant thereof has at least 85% identity to SEQ ID NO: 742, preferably at least 90% identity, 92%, 94%, 96% or more preferably at least 98% sequence identity thereto. More preferably, the portion of Exon 2 of SDC4 comprises or consists of 2 to about 10, about 20, about 30, or up to about 40 or even all contiguous nucleic acids from SEQ ID NO: 741, including at least the nucleic acid of position 75. The number of contiguous nucleic acids may be 2, 3, 4, 5, 6, 7, 8, 9, 10, 11, 12, 13, 14, 15, 16, 17, 18, 19, 20, 21, 22, 23, 24, 25, 26, 27, 28, 29, 30, 31, 32, 33, 34, 35, 36, 37, 38, 39, 40 or all nucleic acids of SEQ ID NO: 741, including at least the nucleic acid of position 75. More preferably, the portion of Exon 2 of said SDC4 comprises or is according to SEQ ID NO: 741, or an allelic variant thereof. Such short polynucleotide sequences are particularly useful for detecting the presence of a larger polynucleotide fusion between said SDC4 and NRG1 and establishing that such a fusion is an in-frame, oncogenic fusion comprising an EGF-like domain of NRG1.

[0342] Alternatively, the portion of Exon 2 of said SDC4 comprises or consists of SEQ ID NO: 746 (or an allelic variant of SEQ ID NO: 746), including at least the nucleic acid of position 139. Preferably, the portion of Exon 2 of said SDC4 comprises or consists of 2 to about 10, about 20, about 30, or up to about 40 or even all contiguous nucleic acids from SEQ ID NO: 746, or from the allelic variant thereof, including at least the nucleic acid of position 139. The number of contiguous nucleic acids may be 2, 3, 4, 5, 6, 7, 8, 9, 10, 11, 12, 13, 14, 15, 16, 17, 18, 19, 20, 21, 22, 23, 24, 25, 26, 27, 28, 29, 30, 31, 32, 33, 34, 35, 36, 37, 38, 39, 40 or all nucleic acids of SEQ ID NO: 746, including at least the nucleic acid of position 139. In this alternative, the portion of Exon 2 of SDC4 more preferably comprises or is according to SEQ ID NO: 746, or an allelic variant thereof. Preferably, the portion of exon 2 of NRG1 in the fusion with said SDC4 comprises or consists of 2 to about 10, about 20, about 30, or up to about 40 or even all contiguous nucleic acids from SEQ ID NO: 126, or from the allelic variant thereof, including at least the nucleic acid of position 1. The number of contiguous nucleic acids may be 2, 3, 4, 5, 6, 7, 8, 9, 10, 11, 12, 13, 14, 15, 16, 17, 18, 19, 20, 21, 22, 23, 24, 25, 26, 27, 28, 29, 30, 31, 32, 33, 34, 35, 36, 37, 38, 39, 40 or all nucleic acids of SEQ ID NO: 126, including at least the nucleic acid of position 1.

[0343] Preferably, any SDC4-NRG1 polynucleotide fusion provided herein is an in-frame fusion of SDC4 with NRG1. More preferably said fusion is an in-frame fusion comprising Exon 2 of SDC4, or a portion of Exon 2, with exon 2 of NRG1, or a portion of exon 2 of NRG1. Said in-frame fusion is preferably the fusion of SEQ ID NO: 743, or an allelic variant thereof having at least 85% identity thereto, preferably at least 90%, 92%, 94%, 96% or even 98% identity thereto.

[0344] In an alternatively preferred embodiment, the polynucleotide comprising a portion of Exon 2 of said SDC4 fused with a portion of exon 2 of NRG1 comprises 2 to about 10, about 20, about 30, or up to about 40 or even all contiguous nucleic acids from SEQ ID NO: 743, including the nucleic acids at positions 75 and 76. The number of contiguous nucleic acids may be 2, 3, 4, 5, 6, 7, 8, 9, 10, 11, 12, 13, 14, 15, 16, 17, 18, 19, 20, 21, 22, 23, 24, 25, 26, 27, 28, 29, 30, 31, 32, 33, 34, 35, 36, 37, 38, 39, 40 or all nucleic acids of SEQ ID NO: 743, including at least the nucleic acids at positions 75 and 76. SEQ ID NO: 743 includes the junction between said SDC4 and NRG1, in particular the junction is between the nucleic acid at position 75, which stems from SDC4 and the nucleic acid at position 76 which stems from NRG1. Preferably, the polynucleotide comprising a portion of Exon 2 of SDC4 fused with a portion of exon 2 of NRG1 has the polynucleotide sequence of SEQ ID NO: 743, or an allelic variant thereof.

[0345] In a preferred embodiment, there is provided a polynucleotide according to SEQ ID NO: 743, or a polynucleotide which comprises about 20, about 30, about 40 or all contiguous nucleic acids from SEQ ID NO: 743, preferably including the nucleic acids at positions 75 and 76. The number of contiguous nucleic acids may be 18, 19, 20, 21, 22, 23, 24, 25, 26, 27, 28, 29, 30, 31, 32, 33, 34, 35, 36, 37, 38, 39, 40 or all nucleic acids of SEQ ID NO: 743, preferably including at least the nucleic acids at positions 75 and 76.

[0346] Preferably, the polynucleotide comprising a portion of Exon 2 of SDC4, or an allelic variant thereof, fused with a portion of exon 2 of NRG1, or an allelic variant thereof, is part of a longer polynucleotide that further comprises or encodes an EGF-like domain of NRG1. An aberrant cell comprising the polynucleotide fusion involving said SDC4 or expressing the polypeptide fusion, comprises or encodes an EGF-like domain of NRG1. For quick detection, diagnosis or identification purposes, it may suffice to show that the fusion junction between said SDC4 and NRG1 is in-frame and occurs at such a position that the resulting fusion product, nucleic acid or protein, comprises an EGF-like domain of NRG1. Said EGF-like domain is preferably the EGF-like domain according to SEQ ID NO: 163, or an allelic variant thereof having at least 85% identity to SEQ ID NO: 163, preferably at least 90% identity, 92%, 94%, 96% or more preferably at least 98% sequence identity thereto.

[0347] Preferably, the portion of Exon 2 of SDC4, or the allelic variant thereof, is 5′ to the portion of exon 2 of NRG1, or the allelic variant thereof. This orientation at the nucleic acid level results in a fusion polypeptide product that contains an N-terminus of SDC4 and a C-terminus of NRG1. Also, the herein provided SDC4-NRG1 polynucleotide fusion produces a protein fusion, wherein the part from the N-terminus to the fusion junction is polypeptide sequence from SDC4 and the part from the junction to the C-terminus is NRG1 polypeptide sequence, wherein the NRG1 part also provides its EGF-like domain. The SDC4-NRG1 fusion protein thereby retains the EGF-like domain of NRG1 and the ability to drive proliferation and survival of a subset of human cancers, in particular lung cancer.

[0348] When present in an aberrant cell of a patient or subject, said polynucleotide fusion preferably further includes any sequence 5′ from Exon 2 of SDC4 and any sequence 3′ from exon 2 of NRG1, but to allow detection of the fusion junction using a polynucleotide-based detection assay, it may suffice that at least SEQ ID NOs: 746 and 126 are present. Any sequence 5′ from Exon 2 of SDC4 comprises or consists of SEQ ID NO: 745 (or any allelic variant of SEQ ID NO: 745), and any sequence 3′ of exon 2 of NRG1 comprises or consists of one or all of SEQ ID NOs: 127-137 (or any allelic variant of SEQ ID NOs: 127-137).

[0349] Further, there is provided a polynucleotide fusion comprising a portion of Exon 4 of SDC4 fused with a portion of exon 2 of NRG1. Exon 4 of said SDC4 is preferably that of SEQ ID NO: 748, or an allelic variant of SEQ ID NO: 748, and exon 2 of NRG1 is preferably that of SEQ ID NO: 126, or an allelic variant of SEQ ID NO: 126.

[0350] Preferably, the allelic variant of exon 4 of said SDC4 has at least 85% identity to SEQ ID NO: 748, preferably at least 90% identity, 92%, 94%, 96% or more preferably at least 98% sequence identity thereto and the allelic variant of exon 2 of NRG1 has at least 85% identity to SEQ ID NO: 126, preferably at least 90% identity, 92%, 94%, 96% or more preferably at least 98% sequence identity thereto.

[0351] Preferably, the portion of exon 4 of said SDC4 comprises or is according to SEQ ID NO: 822 and the allelic variant thereof has at least 85% identity to SEQ ID NO: 822, preferably at least 90% identity, 92%, 94%, 96% or more preferably at least 98% sequence identity thereto. The portion of exon 2 of NRG1 in the fusion with SDC4 preferably is or comprises the sequence according to SEQ ID NO: 823 and the allelic variant thereof has at least 85% identity to SEQ ID NO: 823, preferably at least 90% identity, 92%, 94%, 96% or more preferably at least 98% sequence identity thereto. More preferably, the portion of exon 4 of SDC4 comprises or consists of 2 to about 10, about 20, about 30, or up to about 40 or even all contiguous nucleic acids from SEQ ID NO: 822, including at least the nucleic acid of position 75. The number of contiguous nucleic acids may be 2, 3, 4, 5, 6, 7, 8, 9, 10, 11, 12, 13, 14, 15, 16, 17, 18, 19, 20, 21, 22, 23, 24, 25, 26, 27, 28, 29, 30, 31, 32, 33, 34, 35, 36, 37, 38, 39, 40 or all nucleic acids of SEQ ID NO: 822, including at least the nucleic acid of position 75. More preferably, the portion of exon 4 of said SDC4 comprises or is according to SEQ ID NO: 822, or an allelic variant thereof. Such short polynucleotide sequences are particularly useful for detecting the presence of a larger polynucleotide fusion between said SDC4 and NRG1 and establishing that such a fusion is an in-frame, oncogenic fusion comprising an EGF-like domain of NRG1.

[0352] Alternatively, the portion of exon 4 of said SDC4 comprises or consists of SEQ ID NO: 748 (or an allelic variant of SEQ ID NO: 748), including at least the nucleic acid of position 199. Preferably, the portion of exon 4 of said SDC4 comprises or consists of 2 to about 10, about 20, about 30, or up to about 40 or even all contiguous nucleic acids from SEQ ID NO: 748, or from the allelic variant thereof, including at least the nucleic acid of position 199. The number of contiguous nucleic acids may be 2, 3, 4, 5, 6, 7, 8, 9, 10, 11, 12, 13, 14, 15, 16, 17, 18, 19, 20, 21, 22, 23, 24, 25, 26, 27, 28, 29, 30, 31, 32, 33, 34, 35, 36, 37, 38, 39, 40 or all nucleic acids of SEQ ID NO: 748, including at least the nucleic acid of position 199. In this alternative, the portion of exon 4 of SDC4 more preferably comprises or is according to SEQ ID NO: 748, or an allelic variant thereof. Preferably, the portion of exon 2 of NRG1 in the fusion with of SDC4 comprises or consists of 2 to about 10, about 20, about 30, or up to about 40 or even all contiguous nucleic acids from SEQ ID NO: 126, or from the allelic variant thereof, including at least the nucleic acid of position 1. The number of contiguous nucleic acids may be 2, 3, 4, 5, 6, 7, 8, 9, 10, 11, 12, 13, 14, 15, 16, 17, 18, 19, 20, 21, 22, 23, 24, 25, 26, 27, 28, 29, 30, 31, 32, 33, 34, 35, 36, 37, 38, 39, 40 or all nucleic acids of SEQ ID NO: 126, including at least the nucleic acid of position 1.

[0353] Preferably, any SDC4-NRG1 polynucleotide fusion provided herein is an in-frame fusion of SDC4 with NRG1. More preferably said fusion is an in-frame fusion comprising exon 4 of SDC4, or a portion of exon 4, with exon 2 of NRG1, or a portion of exon 2 of NRG1. Said in-frame fusion is preferably the fusion of SEQ ID NO: 824, or an allelic variant thereof having at least 85% identity thereto, preferably at least 90%, 92%, 94%, 96% or even 98% identity thereto.

[0354] In an alternatively preferred embodiment, the polynucleotide comprising a portion of exon 4 of said SDC4 fused with a portion of exon 2 of NRG1 comprises 2 to about 10, about 20, about 30, or up to about 40 or even all contiguous nucleic acids from SEQ ID NO: 824, including the nucleic acids at positions 75 and 76. The number of contiguous nucleic acids may be 2, 3, 4, 5, 6, 7, 8, 9, 10, 11, 12, 13, 14, 15, 16, 17, 18, 19, 20, 21, 22, 23, 24, 25, 26, 27, 28, 29, 30, 31, 32, 33, 34, 35, 36, 37, 38, 39, 40 or all nucleic acids of SEQ ID NO: 824, including at least the nucleic acids at positions 75 and 76. SEQ ID NO: 824 includes the junction between said SDC4 and NRG1, in particular the junction is between the nucleic acid at position 75, which stems from SDC4 and the nucleic acid at position 76 which stems from NRG1. Preferably, the polynucleotide comprising a portion of exon 4 of SDC4 fused with a portion of exon 2 of NRG1 has the polynucleotide sequence of SEQ ID NO: 824, or an allelic variant thereof.

[0355] In a preferred embodiment, there is provided a polynucleotide according to SEQ ID NO: 824, or a polynucleotide which comprises about 20, about 30, about 40 or all contiguous nucleic acids from SEQ ID NO: 824, preferably including the nucleic acids at positions 75 and 76. The number of contiguous nucleic acids may be 18, 19, 20, 21, 22, 23, 24, 25, 26, 27, 28, 29, 30, 31, 32, 33, 34, 35, 36, 37, 38, 39, 40 or all nucleic acids of SEQ ID NO: 824, preferably including at least the nucleic acids at positions 75 and 76.

[0356] Preferably, the polynucleotide comprising a portion of exon 4 of SDC4, or an allelic variant thereof, fused with a portion of exon 2 of NRG1, or an allelic variant thereof, is part of a longer polynucleotide that further comprises or encodes an EGF-like domain of NRG1. An aberrant cell comprising the polynucleotide fusion involving said SDC4 or expressing the polypeptide fusion, comprises or encodes an EGF-like domain of NRG1. For quick detection, diagnosis or identification purposes, it may suffice to show that the fusion junction between said SDC4 and NRG1 is in-frame and occurs at such a position that the resulting fusion product, nucleic acid or protein, comprises an EGF-like domain of NRG1. Said EGF-like domain is preferably the EGF-like domain according to SEQ ID NO: 163, or an allelic variant thereof having at least 85% identity to SEQ ID NO: 163, preferably at least 90% identity, 92%, 94%, 96% or more preferably at least 98% sequence identity thereto.

[0357] Preferably, the portion of exon 4 of SDC4, or the allelic variant thereof, is 5′ to the portion of exon 2 of NRG1, or the allelic variant thereof. This orientation at the nucleic acid level results in a fusion polypeptide product that contains an N-terminus of SDC4 and a C-terminus of NRG1. Also, the herein provided SDC4-NRG1 polynucleotide fusion produces a protein fusion, wherein the part from the N-terminus to the fusion junction is polypeptide sequence from SDC4 and the part from the junction to the C-terminus is NRG1 polypeptide sequence, wherein the NRG1 part also provides its EGF-like domain. The SDC4-NRG1 fusion protein thereby retains the EGF-like domain of NRG1 and the ability to drive proliferation and survival of a subset of human cancers, including lung cancer, in particular non-small cell lung cancer.

[0358] When present in an aberrant cell of a patient or subject, said polynucleotide fusion preferably further includes any sequence 5′ from Exon 4 of SDC4 and any sequence 3′ from exon 2 of NRG1, but to allow detection of the fusion junction using a polynucleotide-based detection assay, it may suffice that at least SEQ ID NOs: 748 and 126 are present. Any sequence 5′ from Exon 4 of SDC4 comprises or consists of one or all of SEQ ID NOs: 745-747 (or any allelic variant of SEQ ID NOs: 745-747), and any sequence 3′ of exon 2 of NRG1 comprises or consists of one or all of SEQ ID NOs: 127-137 (or any allelic variant of SEQ ID NOs: 127-137).

### SLC4A4-NRG1 Polynucleotide Fusion

[0359] There is also provided a polynucleotide fusion comprising a portion of Exon 14 of SLC4A4 fused with a portion of exon 6 of NRG1. Exon 14 of SLC4A4 is preferably that of SEQ ID NO: 780, or an allelic variant of SEQ ID NO: 780, and exon 6 of NRG1 is preferably that of SEQ ID NO: 130, or an allelic variant of SEQ ID NO:130.

[0360] When present in an aberrant cell of a patient or subject, said polynucleotide fusion preferably further includes any sequence 5′ from Exon 14 of SLC4A4 and any sequence 3′ from exon 6 of NRG1, but to allow detection of the fusion junction using a polynucleotide-based detection assay, it may suffice that at least SEQ ID NOs: 780 and 130 are present. Any sequence 5′ from Exon 14 of SLC4A4 comprises or consists of one or all of SEQ ID NOs: 767-779 (or any allelic variant of SEQ ID NOs: 767-779), and any sequence 3′ of exon 6 of NRG1 comprises or consists of one or all of SEQ ID NOs: 131-137 (or any allelic variant of SEQ ID NOs: 131-137).

[0361] Preferably, the allelic variant of Exon 14 of SLC4A4 has at least 85% identity to SEQ ID NO: 780, preferably at least 90% identity, 92%, 94%, 96% or more preferably at least 98% sequence identity thereto and the allelic variant of exon 6 of NRG1 has at least 85% identity to SEQ ID NO: 130, preferably at least 90% identity, 92%, 94%, 96% or more preferably at least 98% sequence identity thereto.

[0362] Preferably, the portion of Exon 14 of SLC4A4 comprises or is according to SEQ ID NO: 763 and the allelic variant thereof has at least 85% identity to SEQ ID NO: 763, preferably at least 90% identity, 92%, 94%, 96% or more preferably at least 98% sequence identity thereto. The portion of exon 6 of NRG1 in the fusion with SLC4A4 preferably is or comprises the sequence according to SEQ ID NO: 764 and the allelic variant thereof has at least 85% identity to SEQ ID NO: 764, preferably at least 90% identity, 92%, 94%, 96% or more preferably at least 98% sequence identity thereto. More preferably, the portion of Exon 14 of SLC4A4 comprises or consists of 2 to about 10, about 20, about 30, or up to about 40 or even all contiguous nucleic acids from SEQ ID NO: 763, including at least the nucleic acid of position 75. The number of contiguous nucleic acids may be 2, 3, 4, 5, 6, 7, 8, 9, 10, 11, 12, 13, 14, 15, 16, 17, 18, 19, 20, 21, 22, 23, 24, 25, 26, 27, 28, 29, 30, 31, 32, 33, 34, 35, 36, 37, 38, 39, 40 or all nucleic acids of SEQ ID NO: 763, including at least the nucleic acid of position 75. More preferably, the portion of Exon 14 of SLC4A4 comprises or is according to SEQ ID NO: 763, or an allelic variant thereof. Such short polynucleotide sequences are particularly useful for detecting the presence of a larger polynucleotide fusion between SLC4A4 and NRG1 and establishing that such a fusion is an in-frame, oncogenic fusion comprising an EGF-like domain of NRG1.

[0363] Alternatively, the portion of Exon 14 of SLC4A4 comprises or consists of SEQ ID NO: 780 (or an allelic variant of SEQ ID NO: 780), including at least the nucleic acid of position 272. Preferably, the portion of Exon 14 of SLC4A4 comprises or consists of 2 to about 10, about 20, about 30, or up to about 40 or even all contiguous nucleic acids from SEQ ID NO: 780, or from the allelic variant thereof, including at least the nucleic acid of position 272. The number of contiguous nucleic acids may be 2, 3, 4, 5, 6, 7, 8, 9, 10, 11, 12, 13, 14, 15, 16, 17, 18, 19, 20, 21, 22, 23, 24, 25, 26, 27, 28, 29, 30, 31, 32, 33, 34, 35, 36, 37, 38, 39, 40 or all nucleic acids of SEQ ID NO: 780, including at least the nucleic acid of position 272. In this alternative, the portion of Exon 14 of SLC4A4 more preferably comprises or is according to SEQ ID NO: 780, or an allelic variant thereof. Preferably, the portion of exon 6 of NRG1 in the fusion with SLC4A4 comprises or consists of 2 to about 10, about 20, about 30, or up to about 40 or even all contiguous nucleic acids from SEQ ID NO: 130, or from the allelic variant thereof, including at least the nucleic acid of position 1. The number of contiguous nucleic acids may be 2, 3, 4, 5, 6, 7, 8, 9, 10, 11, 12, 13, 14, 15, 16, 17, 18, 19, 20, 21, 22, 23, 24, 25, 26, 27, 28, 29, 30, 31, 32, 33, 34, 35, 36, 37, 38, 39, 40 or all nucleic acids of SEQ ID NO: 130, including at least the nucleic acid of position 1.

[0364] Preferably, any SLC4A4-NRG1 polynucleotide fusion provided herein is an in-frame fusion of SLC4A4 with NRG1. More preferably said fusion is an in frame fusion comprising Exon 14 of SLC4A4, or a portion of Exon 14, with exon 6 of NRG1, or a portion of exon 6 of NRG1. Said in-frame fusion is preferably the fusion of SEQ ID NO: 765, or an allelic variant thereof having at least 85% identity thereto, preferably at least 90%, 92%, 94%, 96% or even 98% identity thereto.

[0365] In an alternatively preferred embodiment, the polynucleotide comprising a portion of Exon 14 of SLC4A4 fused with a portion of exon 6 of NRG1 comprises 2 to about 10, about 20, about 30, or up to about 40 or even all contiguous nucleic acids from SEQ ID NO: 765, including the nucleic acids at positions 75 and 76. The number of contiguous nucleic acids may be 2, 3, 4, 5, 6, 7, 8, 9, 10, 11, 12, 13, 14, 15, 16, 17, 18, 19, 20, 21, 22, 23, 24, 25, 26, 27, 28, 29, 30, 31, 32, 33, 34, 35, 36, 37, 38, 39, 40 or all nucleic acids of SEQ ID NO: 765, including at least the nucleic acids at positions 75 and 76. SEQ ID NO: 765 includes the junction between SLC4A4 and NRG1, in particular the junction is between the nucleic acid at position 75, which stems from SLC4A4 and the nucleic acid at position 76 which stems from NRG1. Preferably, the polynucleotide comprising a portion of Exon 14 of SLC4A4 fused with a portion of exon 6 of NRG1 has the polynucleotide sequence of SEQ ID NO: 765, or an allelic variant thereof.

[0366] In a preferred embodiment, there is provided a polynucleotide according to SEQ ID NO: 765, or a polynucleotide which comprises about 20, about 30, about 40 or all contiguous nucleic acids from SEQ ID NO: 765, preferably including the nucleic acids at positions 75 and 76. The number of contiguous nucleic acids may be 18, 19, 20, 21, 22, 23, 24, 25, 26, 27, 28, 29, 30, 31, 32, 33, 34, 35, 36, 37, 38, 39, 40 or all nucleic acids of SEQ ID NO: 765, preferably including at least the nucleic acids at positions 75 and 76.

[0367] Preferably, the polynucleotide comprising a portion of Exon 14 of SLC4A4, or an allelic variant thereof, fused with a portion of exon 6 of NRG1, or an allelic variant thereof, is part of a longer polynucleotide that further comprises or encodes an EGF-like domain of NRG1. An aberrant cell comprising the polynucleotide fusion involving SLC4A4 or expressing the polypeptide fusion, comprises or encodes an EGF-like domain of NRG1. For quick detection, diagnosis or identification purposes, it may suffice to show that the fusion junction between SLC4A4 and NRG1 is in-frame and occurs at such a position that the resulting fusion product, nucleic acid or protein, comprises an EGF-like domain of NRG1. Said EGF-like domain is preferably the EGF-like domain according to SEQ ID NO: 163, or an allelic variant thereof having at least 85% identity to SEQ ID NO: 163, preferably at least 90% identity, 92%, 94%, 96% or more preferably at least 98% sequence identity thereto.

[0368] Preferably, the portion of Exon 14 of SLC4A4, or the allelic variant thereof, is 5′ to the portion of exon 6 of NRG1, or the allelic variant thereof. This orientation at the nucleic acid level results in a fusion polypeptide product that contains an N-terminus of SLC4A4 and a C-terminus of NRG1. Also, the herein provided SLC4A4-NRG1 polynucleotide fusion produces a protein fusion, wherein the part from the N-terminus to the fusion junction is polypeptide sequence from SLC4A4 and the part from the junction to the C-terminus is NRG1 polypeptide sequence, wherein the NRG1 part also provides its EGF-like domain. The SLC4A4-NRG1 fusion protein thereby retains the EGF-like domain of NRG1 and the ability to drive proliferation and survival of a subset of human cancers, in particular a pancreatic cancer.

### ZFAT-NRG1 Polynucleotide Fusion

[0369] In accordance with the present disclosure, there is also provided a polynucleotide comprising a ZFAT nucleic acid sequence (or a portion of a ZFAT nucleic acid sequence) fused with an NRG1 nucleic acid sequence (or a portion of an NRG1 nucleic acid sequence). Also included in said fusion are allelic variants of ZFAT and NRG1 nucleic acid sequences.

[0370] Preferably, the ZFAT nucleic acid sequence, or the portion thereof, comprises or consists of any one of SEQ ID NOs: 830-846, or an allelic variant of any one of SEQ ID NOs: 830-846, and the NRG1 nucleic acid sequence, or the portion thereof, comprises or consists of any one of SEQ ID NOs: 125-138, or an allelic variant of any one of SEQ ID NOs: 125-138. More preferably, the ZFAT nucleic acid sequence comprises a portion of SEQ ID NOs: 846, or an allelic variant of SEQ ID NOs: 846, and the NRG1 nucleic acid sequence preferably comprises a portion of SEQ ID NOs: 138, or an allelic variant of SEQ ID NOs: 138. SEQ ID NOs: 830-845 correspond to the individual exons 1-16 of ZFAT according to NM_020863.4, respectively. SEQ ID NO: 846 corresponds to exons 1-16 of ZFAT according to NM_020863.4. SEQ ID NOs: 125-137 correspond to the individual exons 1-13 of the NRG1 sequence according to NM_001159999.3, respectively. SEQ ID NO: 138 corresponds to exons 1-13 of NRG1 according to NM_001159999.3.

[0371] In a preferred embodiment, the portion of the ZFAT nucleic acid sequence comprises 2 to about 10, about 20, about 30, or up to about 40 or even all contiguous nucleic acids from any one of SEQ ID NOs: 830-846, or an allelic variant of any one of SEQ ID NOs: 830-846, and the portion of the NRG1 nucleic acid sequence comprises 2 to about 10, about 20, about 30, or up to about 40 or even all contiguous nucleic acids of any one of SEQ ID NOs: 125-138, or an allelic variant of any one of SEQ ID NOs: 125-138.

[0372] Preferably, the allelic variant of the ZFAT nucleic acid sequences has at least 85% identity to any one of SEQ ID NOs: 830-846, preferably at least 90% identity, 92%, 94%, 96% or more preferably at least 98% sequence identity thereto; and the allelic variant of the NRG1 nucleic acid sequences has at least 85% identity to any one of SEQ ID NOs: 125-138, preferably at least 90% identity, 92%, 94%, 96% or more preferably at least 98% sequence identity thereto.

[0373] Preferably, the ZFAT nucleic acid sequence, or the portion thereof, is 5′ to the NRG1 nucleic acid sequence, or the portion thereof.

[0374] Preferably, the polynucleotide comprising a ZFAT nucleic acid sequence of ZFAT, or a portion of said sequence, fused with a NRG1 nucleic acid sequence, or portion of said sequence, comprises or encodes an EGF-like domain of NRG1.

[0375] An aberrant cell comprising the ZFAT-NRG1 polynucleotide fusion or expressing the polypeptide fusion, comprises or encodes an EGF-like domain of NRG1. For detection, diagnosis or identification purposes, it may suffice to show that the fusion junction between ZFAT and NRG1 is in-frame and occurs at a position such that the resulting fusion product, nucleic acid or protein, comprises an EGF-like domain of NRG1. Said EGF-like domain is preferably the EGF-like domain according to SEQ ID NO: 163, or an allelic variant thereof having at least 85% identity to SEQ ID NO: 163, preferably at least 90% identity, 92%, 94%, 96% or more preferably at least 98% sequence identity thereto.

[0376] There is also provided a polynucleotide fusion comprising a portion of Exon 12 of ZFAT fused with a portion of exon 6 of NRG1. Exon 12 of ZFAT is preferably that of SEQ ID NO: 841, or an allelic variant of SEQ ID NO: 841, and exon 6 of NRG1 is preferably that of SEQ ID NO: 130, or an allelic variant of SEQ ID NO:130.

[0377] When present in an aberrant cell of a patient or subject, said polynucleotide fusion preferably further includes any sequence 5′ from Exon 12 of ZFAT and any sequence 3′ from exon 6 of NRG1, but to allow detection of the fusion junction using a polynucleotide-based detection assay, it may suffice that at least SEQ ID NOs: 841 and 130 are present. Any sequence 5′ from Exon 12 of ZFAT comprises or consists of one or all of SEQ ID NOs: 830-840 (or any allelic variant of SEQ ID NOs: 830-840), and any sequence 3′ of exon 6 of NRG1 comprises or consists of one or all of SEQ ID NOs: 131-137 (or any allelic variant of SEQ ID NOs: 131-137).

[0378] Preferably, the allelic variant of Exon 12 of ZFAT has at least 85% identity to SEQ ID NO: 841, preferably at least 90% identity, 92%, 94%, 96% or more preferably at least 98% sequence identity thereto and the allelic variant of exon 6 of NRG1 has at least 85% identity to SEQ ID NO: 130, preferably at least 90% identity, 92%, 94%, 96% or more preferably at least 98% sequence identity thereto.

[0379] Preferably, the portion of Exon 12 of ZFAT comprises or is according to SEQ ID NO: 826 and the allelic variant thereof has at least 85% identity to SEQ ID NO: 826, preferably at least 90% identity, 92%, 94%, 96% or more preferably at least 98% sequence identity thereto. The portion of exon 6 of NRG1 in the fusion with ZFAT preferably is or comprises the sequence according to SEQ ID NO: 827 and the allelic variant thereof has at least 85% identity to SEQ ID NO: 827, preferably at least 90% identity, 92%, 94%, 96% or more preferably at least 98% sequence identity thereto. More preferably, the portion of Exon 12 of ZFAT comprises or consists of 2 to about 10, about 20, about 30, or up to about 40 or even all contiguous nucleic acids from SEQ ID NO: 826, including at least the nucleic acid of position 75. The number of contiguous nucleic acids may be 2, 3, 4, 5, 6, 7, 8, 9, 10, 11, 12, 13, 14, 15, 16, 17, 18, 19, 20, 21, 22, 23, 24, 25, 26, 27, 28, 29, 30, 31, 32, 33, 34, 35, 36, 37, 38, 39, 40 or all nucleic acids of SEQ ID NO: 826, including at least the nucleic acid of position 75. More preferably, the portion of Exon 12 of ZFAT comprises or is according to SEQ ID NO: 826, or an allelic variant thereof. Such short polynucleotide sequences are particularly useful for detecting the presence of a larger polynucleotide fusion between ZFAT and NRG1 and establishing that such a fusion is an in-frame, oncogenic fusion comprising an EGF-like domain of NRG1.

[0380] Alternatively, the portion of Exon 12 of ZFAT comprises or consists of SEQ ID NO: 841 (or an allelic variant of SEQ ID NO: 841), including at least the nucleic acid of position 139. Preferably, the portion of Exon 12 of ZFAT comprises or consists of 2 to about 10, about 20, about 30, or up to about 40 or even all contiguous nucleic acids from SEQ ID NO: 841, or from the allelic variant thereof, including at least the nucleic acid of position 139. The number of contiguous nucleic acids may be 2, 3, 4, 5, 6, 7, 8, 9, 10, 11, 12, 13, 14, 15, 16, 17, 18, 19, 20, 21, 22, 23, 24, 25, 26, 27, 28, 29, 30, 31, 32, 33, 34, 35, 36, 37, 38, 39, 40 or all nucleic acids of SEQ ID NO: 841, including at least the nucleic acid of position 139. In this alternative, the portion of Exon 12 of ZFAT more preferably comprises or is according to SEQ ID NO: 841, or an allelic variant thereof. Preferably, the portion of exon 6 of NRG1 in the fusion with ZFAT comprises or consists of 2 to about 10, about 20, about 30, or up to about 40 or even all contiguous nucleic acids from SEQ ID NO: 130, or from the allelic variant thereof, including at least the nucleic acid of position 1. The number of contiguous nucleic acids may be 2, 3, 4, 5, 6, 7, 8, 9, 10, 11, 12, 13, 14, 15, 16, 17, 18, 19, 20, 21, 22, 23, 24, 25, 26, 27, 28, 29, 30, 31, 32, 33, 34, 35, 36, 37, 38, 39, 40 or all nucleic acids of SEQ ID NO: 130, including at least the nucleic acid of position 1.

[0381] In an alternatively preferred embodiment, the polynucleotide comprising a portion of Exon 12 of ZFAT fused with a portion of exon 6 of NRG1 comprises 2 to about 10, about 20, about 30, or up to about 40 or even all contiguous nucleic acids from SEQ ID NO: 828, including the nucleic acids at positions 75 and 76. The number of contiguous nucleic acids may be 2, 3, 4, 5, 6, 7, 8, 9, 10, 11, 12, 13, 14, 15, 16, 17, 18, 19, 20, 21, 22, 23, 24, 25, 26, 27, 28, 29, 30, 31, 32, 33, 34, 35, 36, 37, 38, 39, 40 or all nucleic acids of SEQ ID NO: 828, including at least the nucleic acids at positions 75 and 76. SEQ ID NO: 828 includes the junction between ZFAT and NRG1, in particular the junction is between the nucleic acid at position 75, which stems from ZFAT and the nucleic acid at position 76 which stems from NRG1. Preferably, the polynucleotide comprising a portion of Exon 12 of ZFAT fused with a portion of exon 6 of NRG1 has the polynucleotide sequence of SEQ ID NO: 828, or an allelic variant thereof.

[0382] Preferably, any ZFAT-NRG1 polynucleotide fusion provided herein is an in-frame fusion of ZFAT with NRG1. More preferably said fusion is an in frame fusion comprising Exon 12 of ZFAT, or a portion of Exon 12, with exon 6 of NRG1, or a portion of exon 6 of NRG1. Said in-frame fusion is preferably the fusion of SEQ ID NO: 828, or an allelic variant thereof having at least 85% identity thereto, preferably at least 90%, 92%, 94%, 96% or even 98% identity thereto.

[0383] Preferably, the portion of Exon 12 of ZFAT, or the allelic variant thereof, is 5′ to the portion of exon 6 of NRG1, or the allelic variant thereof. This orientation at the nucleic acid level results in a fusion polypeptide product that contains an N-terminus of ZFAT and a C-terminus of NRG1. Also, the herein provided ZFAT-NRG1 polynucleotide fusion produces a protein fusion, wherein the part from the N-terminus to the fusion junction is polypeptide sequence from ZFAT and the part from the junction to the C-terminus is NRG1 polypeptide sequence, wherein the NRG1 part also provides its EGF-like domain. The ZFAT-NRG1 fusion protein thereby retains the EGF-like domain of NRG1 and the ability to drive proliferation and survival of a subset of human cancers, in particular non-small cell lung cancer.

### DSCAML1-NRG1 Polynucleotide Fusion

[0384] In accordance with the present disclosure, there is also provided a polynucleotide comprising a DSCAML1 nucleic acid sequence (or a portion of a DSCAML1 nucleic acid sequence) fused with an NRG1 nucleic acid sequence (or a portion of an NRG1 nucleic acid sequence). Also included in said fusion are allelic variants of DSCAML1 and NRG1 nucleic acid sequences.

[0385] Preferably, the DSCAML1 nucleic acid sequence, or the portion thereof, comprises or consists of any one of SEQ ID NOs: 870-903, or an allelic variant of any one of SEQ ID NOs: 870-903, and the NRG1 nucleic acid sequence, or the portion thereof, comprises or consists of any one of SEQ ID NOs: 125-138, or an allelic variant of any one of SEQ ID NOs: 125-138. More preferably, the DSCAML1 nucleic acid sequence comprises a portion of SEQ ID NOs: 903, or an allelic variant of SEQ ID NOs: 903, and the NRG1 nucleic acid sequence preferably comprises a portion of SEQ ID NOs: 138, or an allelic variant of SEQ ID NOs: 138. SEQ ID NOs: 870-902 correspond to the individual exons 1-33 of DSCAML1 according to NM_020693.4, respectively. SEQ ID NO: 903 corresponds to exons 1-33 of DSCAML1 according to NM_020693.4. SEQ ID NOs: 125-137 correspond to the individual exons 1-13 of the NRG1 sequence according to NM_001159999.3, respectively. SEQ ID NO: 138 corresponds to exons 1-13 of NRG1 according to NM_001159999.3.

[0386] In a preferred embodiment, the portion of the DSCAML1 nucleic acid sequence comprises 2 to about 10, about 20, about 30, or up to about 40 or even all contiguous nucleic acids from any one of SEQ ID NOs: 870-903, or an allelic variant of any one of SEQ ID NOs: 870-903, and the portion of the NRG1 nucleic acid sequence comprises 2 to about 10, about 20, about 30, or up to about 40 or even all contiguous nucleic acids of any one of SEQ ID NOs: 125-138, or an allelic variant of any one of SEQ ID NOs: 125-138.

[0387] Preferably, the allelic variant of the DSCAML1 nucleic acid sequences has at least 85% identity to any one of SEQ ID NOs: 870-903, preferably at least 90% identity, 92%, 94%, 96% or more preferably at least 98% sequence identity thereto; and the allelic variant of the NRG1 nucleic acid sequences has at least 85% identity to any one of SEQ ID NOs: 125-138, preferably at least 90% identity, 92%, 94%, 96% or more preferably at least 98% sequence identity thereto.

[0388] Preferably, the DSCAML1 nucleic acid sequence, or the portion thereof, is 5′ to the NRG1 nucleic acid sequence, or the portion thereof.

[0389] Preferably, the polynucleotide comprising a DSCAML1 nucleic acid sequence of DSCAML1, or a portion of said sequence, fused with a NRG1 nucleic acid sequence, or portion of said sequence, comprises or encodes an EGF-like domain of NRG1.

[0390] An aberrant cell comprising the DSCAML1-NRG1 polynucleotide fusion or expressing the polypeptide fusion, comprises or encodes an EGF-like domain of NRG1. For detection, diagnosis or identification purposes, it may suffice to show that the fusion junction between DSCAML1 and NRG1 is in-frame and occurs at a position such that the resulting fusion product, nucleic acid or protein, comprises an EGF-like domain of NRG1. Said EGF-like domain is preferably the EGF-like domain according to SEQ ID NO: 163, or an allelic variant thereof having at least 85% identity to SEQ ID NO: 163, preferably at least 90% identity, 92%, 94%, 96% or more preferably at least 98% sequence identity thereto.

[0391] There is also provided a polynucleotide fusion comprising a portion of Exon 3 of DSCAML1 fused with a portion of exon 2 of NRG1. Exon 3 of DSCAML1 is preferably that of SEQ ID NO: 872, or an allelic variant of SEQ ID NO: 872, and exon 2 of NRG1 is preferably that of SEQ ID NO: 126, or an allelic variant of SEQ ID NO:126.

[0392] When present in an aberrant cell of a patient or subject, said polynucleotide fusion preferably further includes any sequence 5′ from Exon 3 of DSCAML1 and any sequence 3′ from exon 2 of NRG1, but to allow detection of the fusion junction using a polynucleotide-based detection assay, it may suffice that at least SEQ ID NOs: 872 and 126 are present. Any sequence 5′ from Exon 3 of DSCAML1 comprises or consists of one or all of SEQ ID NOs: 870-871 (or any allelic variant of SEQ ID NOs: 870-871), and any sequence 3′ of exon 2 of NRG1 comprises or consists of one or all of SEQ ID NOs: 127-137 (or any allelic variant of SEQ ID NOs: 127-137).

[0393] Preferably, the allelic variant of Exon 3 of DSCAML1 has at least 85% identity to SEQ ID NO: 872, preferably at least 90% identity, 92%, 94%, 96% or more preferably at least 98% sequence identity thereto and the allelic variant of exon 2 of NRG1 has at least 85% identity to SEQ ID NO: 126, preferably at least 90% identity, 92%, 94%, 96% or more preferably at least 98% sequence identity thereto.

[0394] Preferably, the portion of Exon 3 of DSCAML1 comprises or is according to SEQ ID NO: 866 and the allelic variant thereof has at least 85% identity to SEQ ID NO: 866, preferably at least 90% identity, 92%, 94%, 96% or more preferably at least 98% sequence identity thereto. The portion of exon 2 of NRG1 in the fusion with DSCAML1 preferably is or comprises the sequence according to SEQ ID NO: 867 and the allelic variant thereof has at least 85% identity to SEQ ID NO: 867, preferably at least 90% identity, 92%, 94%, 96% or more preferably at least 98% sequence identity thereto. More preferably, the portion of Exon 3 of DSCAML1 comprises or consists of 2 to about 10, about 20, about 30, or up to about 40 or even all contiguous nucleic acids from SEQ ID NO: 866, including at least the nucleic acid of position 75. The number of contiguous nucleic acids may be 2, 3, 4, 5, 6, 7, 8, 9, 10, 11, 12, 13, 14, 15, 16, 17, 18, 19, 20, 21, 22, 23, 24, 25, 26, 27, 28, 29, 30, 31, 32, 33, 34, 35, 36, 37, 38, 39, 40 or all nucleic acids of SEQ ID NO: 866, including at least the nucleic acid of position 75. More preferably, the portion of Exon 3 of DSCAML1 comprises or is according to SEQ ID NO: 866, or an allelic variant thereof. Such short polynucleotide sequences are particularly useful for detecting the presence of a larger polynucleotide fusion between DSCAML1 and NRG1 and establishing that such a fusion is an in-frame, oncogenic fusion comprising an EGF-like domain of NRG1.

[0395] Alternatively, the portion of Exon 3 of DSCAML1 comprises or consists of SEQ ID NO: 872 (or an allelic variant of SEQ ID NO: 872), including at least the nucleic acid of position 147. Preferably, the portion of Exon 3 of DSCAML1 comprises or consists of 2 to about 10, about 20, about 30, or up to about 40 or even all contiguous nucleic acids from SEQ ID NO: 872, or from the allelic variant thereof, including at least the nucleic acid of position 147. The number of contiguous nucleic acids may be 2, 3, 4, 5, 6, 7, 8, 9, 10, 11, 12, 13, 14, 15, 16, 17, 18, 19, 20, 21, 22, 23, 24, 25, 26, 27, 28, 29, 30, 31, 32, 33, 34, 35, 36, 37, 38, 39, 40 or all nucleic acids of SEQ ID NO: 872, including at least the nucleic acid of position 147. In this alternative, the portion of Exon 3 of DSCAML1 more preferably comprises or is according to SEQ ID NO: 872, or an allelic variant thereof. Preferably, the portion of exon 2 of NRG1 in the fusion with DSCAML1 comprises or consists of 2 to about 10, about 20, about 30, or up to about 40 or even all contiguous nucleic acids from SEQ ID NO: 126, or from the allelic variant thereof, including at least the nucleic acid of position 1. The number of contiguous nucleic acids may be 2, 3, 4, 5, 6, 7, 8, 9, 10, 11, 12, 13, 14, 15, 16, 17, 18, 19, 20, 21, 22, 23, 24, 25, 26, 27, 28, 29, 30, 31, 32, 33, 34, 35, 36, 37, 38, 39, 40 or all nucleic acids of SEQ ID NO: 126, including at least the nucleic acid of position 1.

[0396] In an alternatively preferred embodiment, the polynucleotide comprising a portion of Exon 3 of DSCAML1 fused with a portion of exon 2 of NRG1 comprises 2 to about 10, about 20, about 30, or up to about 40 or even all contiguous nucleic acids from SEQ ID NO: 868, including the nucleic acids at positions 75 and 76. The number of contiguous nucleic acids may be 2, 3, 4, 5, 6, 7, 8, 9, 10, 11, 12, 13, 14, 15, 16, 17, 18, 19, 20, 21, 22, 23, 24, 25, 26, 27, 28, 29, 30, 31, 32, 33, 34, 35, 36, 37, 38, 39, 40 or all nucleic acids of SEQ ID NO: 868, including at least the nucleic acids at positions 75 and 76. SEQ ID NO: 868 includes the junction between DSCAML1 and NRG1, in particular the junction is between the nucleic acid at position 75, which stems from DSCAML1 and the nucleic acid at position 76 which stems from NRG1. Preferably, the polynucleotide comprising a portion of Exon 3 of DSCAML1 fused with a portion of exon 2 of NRG1 has the polynucleotide sequence of SEQ ID NO: 868, or an allelic variant thereof.

[0397] Preferably, any DSCAML1-NRG1 polynucleotide fusion provided herein is an in-frame fusion of DSCAML1 with NRG1. More preferably said fusion is an in-frame fusion comprising Exon 3 of DSCAML1, or a portion of Exon 3, with exon 2 of NRG1, or a portion of exon 2 of NRG1. Said in frame fusion is preferably the fusion of SEQ ID NO: 868, or an allelic variant thereof having at least 85% identity thereto, preferably at least 90%, 92%, 94%, 96% or even 98% identity thereto.

[0398] Preferably, the portion of Exon 3 of DSCAML1, or the allelic variant thereof, is 5′ to the portion of exon 2 of NRG1, or the allelic variant thereof. This orientation at the nucleic acid level results in a fusion polypeptide product that contains an N-terminus of DSCAML1 and a C-terminus of NRG1. Also, the herein provided DSCAML1-NRG1 polynucleotide fusion produces a protein fusion, wherein the part from the N-terminus to the fusion junction is polypeptide sequence from DSCAML1 and the part from the junction to the C-terminus is NRG1 polypeptide sequence, wherein the NRG1 part also provides its EGF-like domain. The DSCAML1-NRG1 fusion protein thereby retains the EGF-like domain of NRG1 and the ability to drive proliferation and survival of a subset of human cancers, in particular an adenocarcinoma, more in particular pancreatic ductal adenocarcinoma.

[0399] Each of the herein mentioned polynucleotide fusions comprising NRG1, including VAPB-NRG1, CADM1-NRG1, CD44-NRG1, SLC3A2-NRG1, VTCN1-NRG1, CDH1-NRG1, CXADR-NRG1, GTF2E2-NRG1, CSMD1-NRG1, PTN-NRG1, ST14-NRG1, THBS1-NRG1, AGRN-NRG1, PVALB-NRG1, APP-NRG1, WRN-NRG1, DAAM1-NRG1, ASPH-NRG1, NOTCH2-NRG1, CD74-NRG1, SDC4-NRG1, SLC4A4-NRG1, ZFAT-NRG1 or DSCAML1-NRG1, is preferably isolated. Any method of the invention preferably comprises isolating one or more polynucleotide-containing components from a sample. The one or more polynucleotide-containing components are typically isolated from any cells or cellular material in the sample.

### NRG1 Polypeptide Fusions

[0400] In accordance with the present disclosure are now provided, polypeptide fusions comprising NRG1, including VAPB-NRG1, CADM1-NRG1, CD44-NRG1, SLC3A2-NRG1, VTCN1-NRG1, CDH1-NRG1, CXADR-NRG1, GTF2E2-NRG1, CSMD1-NRG1, PTN-NRG1, ST14-NRG1, THBS1-NRG1, AGRN-NRG1, PVALB-NRG1, APP-NRG1, WRN-NRG1, ASPH-NRG1, NOTCH2-NRG1, CD74-NRG1, SDC4-NRG1, SLC4A4-NRG1, ZFAT-NRG1 and DSCAML1-NRG1. In particular, such fusions are present or have been identified in human patients diagnosed with cancer and are mentioned in more details in the following section.

### VAPB-NRG1 Polypeptide Fusions

[0401] In accordance with the present disclosure, there is provided a polypeptide fusion encoded by a polynucleotide comprising a VAPB nucleic acid sequence (or a portion of a VAPB nucleic acid sequence) fused with an NRG1 nucleic acid sequence (or a portion of a NRG1 nucleic acid sequence). The VAPB nucleic acid sequence, or portion thereof, preferably encodes a sequence comprising or consisting of any one of SEQ ID NOs 24-30, or an allelic variant of any one of these SEQ ID NOs. The NRG1 nucleic acid sequence, or portion thereof, preferably encodes a sequence comprising or consisting of any one of SEQ ID NOs 139-152, or an allelic variant of any one of these SEQ ID NOs.

[0402] The VAPB allelic variant of any one of SEQ ID NOs: 24-30, preferably has at least 85% sequence identity therewith, more preferably 90%, 92%, 94%, 96% or even more preferably at least 98% sequence identity therewith. The NRG1 allelic variant of any one of SEQ ID NOs: 139-152, preferably has at least 85% sequence identity therewith, more preferably 90%, 92%, 94%, 96% or even more preferably at least 98% sequence identity therewith.

[0403] Preferably, the portion of the VAPB nucleic acid sequence of said fusion encodes a polypeptide part of VAPB which comprises or consists of 8, 9, 10, 11, 12, 13 or 14 contiguous amino acids from any one of SEQ ID NOs 24-30, or an allelic variant of any one of SEQ ID NOs 24-30. Preferably, the portion of the NRG1 nucleic acid sequence of said fusion encodes a polypeptide part of NRG1 which comprises or consists 8, 9, 10, 11, 12, 13 or 14 contiguous amino acids from of any one of SEQ ID NOs 139-152, or an allelic variant of any one of SEQ ID NOs 139-152.

[0404] Preferably, any VAPB-NRG1 polypeptide fusion of the present disclosure includes a polypeptide sequence of any one of SEQ ID NOs: 24-30 having one or more (i.e. 1, 2, 3, 4, 5, 6, 7, 8, 9 or 10) point mutations that add, delete or substitute any of the amino acids of the polypeptides of SEQ ID NOs: 24-30. Preferably, said polypeptide fusion includes a polypeptide sequence of any one of SEQ ID NOs: 24-34 having 1, 2, 3, 4, or 5 point mutations that add, delete or substitute any of the amino acids of polypeptides of SEQ ID NO: 24-30. More preferably, said polynucleotide fusion includes a polypeptide sequence of any one of SEQ ID NOs: 24-30 having 1, 2, or 3 point mutations that add, delete or substitute any of the amino acids of the polypeptides of SEQ ID NO: 24-30.

[0405] In a preferred embodiment, there is provided a polypeptide fusion encoded by a polynucleotide which comprises a portion of exon 1 of VAPB, or an allelic variant thereof, and a portion of exon 2 of NRG1, or an allelic variant thereof. The polypeptide encoded by exon 1 of VAPB preferably comprises or consists of SEQ ID NO: 24, or an allelic variant of SEQ ID NO: 24. The polypeptide encoded by exon 2 of NRG1 preferably comprises or consists of SEQ ID NO: 140, or an allelic variant of SEQ ID NO: 140. Preferably, said polypeptide fusion further includes any one or all of SEQ ID NOs: 141-151, or any allelic variant of SEQ ID NOs: 141-151. SEQ ID NOs: 141-151 correspond to the individual polypeptide sequences encoded by exons 3-13 of NRG1, respectively. Said portion of exon 2 of NRG1 may also be according to SEQ ID NO: 154, or an allelic variant of SEQ ID NO: 154, which sequence corresponds to the polypeptide sequence encoded by all of exons 2-13.

[0406] Preferably, the polypeptide encoded by the portion of exon 1 of VAPB comprises or consists of 8, 9, 10, 11, 12, 13 or 14 contiguous amino acids from SEQ ID NO: 24, or from an allelic variant SEQ ID NO: 24. The allelic variant has at least 85% identity to SEQ ID NO: 24, preferably at least 90% identity, 92%, 94%, 96% or more preferably at least 98% sequence identity thereto. Also, the polypeptide encoded by the portion of exon 2 of NRG1 comprises or consists of 8, 9, 10, 11, 12, 13 or 14 contiguous amino acids from SEQ ID NO: 140, or from an allelic variant SEQ ID NO: 140. The allelic variant has at least 85% identity to SEQ ID NO: 140, preferably at least 90% identity, 92%, 94%, 96% or more preferably at least 98% sequence identity thereto.

[0407] Preferably, any VAPB-NRG1 polypeptide fusion of the present disclosure includes the polypeptide sequence according to SEQ ID NO: 4, or an allelic variant thereof. SEQ ID NO: 4 contains a fusion junction between VAPB and NRG1, which fusion is located between amino acid at position 14 (which, together with amino acids at positions 1-13, stems from VAPB) and the amino acid at position 16 (which, together with amino acids at positions 17-31 stems from NRG1). At position 15, an alanine (A, Ala) residue is present due to an unpredicted in frame fusion of NRG1 with VAPB. Preferably, the VAPB-NRG1 polypeptide fusion includes 8, 9, 10, 11, 12, 13 or 14 contiguous amino acids from SEQ ID NO: 4, or of an allelic variant thereof, including at least the amino acids at position 14, 15 and 16.

[0408] In a preferred embodiment, there is provided a polypeptide sequence according to SEQ ID NO: 4, or a polypeptide which comprises 8, 9, 10, 11, 12, 13, 14 or all contiguous amino acids from SEQ ID NO: 4, or of an allelic variant thereof, including at least the amino acids at position 14, 15 and 16. Said polypeptide sequence has at least 85% identity to SEQ ID NO: 4, preferably at least 90% identity, 92%, 94%, 96% or more preferably at least 98% sequence identity thereto.

[0409] Preferably, any VAPB-NRG1 polypeptide fusion of the present disclosure includes the polypeptide sequence of SEQ ID NO: 4 having one or more (i.e. 1, 2, 3, 4, 5, 6, 7, 8, 9 or 10) point mutations that add, delete or substitute any of the amino acids of the polypeptide comprising SEQ ID NO: 4. Preferably, said polypeptide fusion includes the polypeptide sequence of SEQ ID NO: 4 having 1, 2, 3, 4, or 5 point mutations that add, delete or substitute any of the amino acids of the polypeptide comprising SEQ ID NO: 4. More preferably, said polynucleotide fusion includes the polypeptide sequence of SEQ ID NO: 4 polypeptide having 1, 2 or 3 point mutations that add, delete or substitute any of the amino acids of the polypeptide comprising SEQ ID NO: 4.

[0410] Preferably, the herein provided polypeptide fusion between NRG1 and VAPB is oriented such that the part spanning the N-terminus to the fusion junction is polypeptide sequence from VAPB and the part spanning the fusion junction to the C-terminus is NRG1 polypeptide sequence. Preferably, the NRG1 polypeptide sequence comprises or encodes an EGF-like domain. Said EGF-like domain containing VAPB-NRG1 polypeptide fusion is preferably comprised by an aberrant cell as mentioned herein.

### CADM1-NRG1 Polypeptide Fusion

[0411] Also provided is a polypeptide fusion encoded by a polynucleotide which comprises a portion of exon 7 of CADM1, or an allelic variant thereof, and a portion of exon 6 of NRG1, or an allelic variant thereof. The polypeptide encoded by exon 7 of CADM1 preferably comprises or consists of SEQ ID NO: 51, or an allelic variant of SEQ ID NO: 51. The polypeptide encoded by exon 6 of NRG1 preferably comprises or consists of SEQ ID NO: 144, or an allelic variant of SEQ ID NO: 144. Preferably, said polypeptide fusion further includes any one or all of SEQ ID NOs: 45-50, or any allelic variant of any one of SEQ ID NOs: 45-50, and preferably further includes any one of SEQ ID NOs: 145-151, or any allelic variant of any one of SEQ ID NOs: 145-151. SEQ ID NOs: 45-50 correspond to the individual polypeptide sequences encoded by exons 1-7 of CADM1, respectively. SEQ ID NOs: 145-151 correspond to the individual polypeptide sequences encoded by exons 7-13 of NRG1, respectively. Said portion of exon 6 of NRG1 may also be comprised by SEQ ID NO: 156, or an allelic variant of SEQ ID NO: 156, which sequence corresponds to the polypeptide sequence encoded by all of exons 6-13.

[0412] Preferably, the polypeptide encoded by the portion of exon 7 of CADM1 comprises or consists of 8, 9, 10, 11, 12, 13 or 14 contiguous amino acids from SEQ ID NO: 51, or from an allelic variant SEQ ID NO: 51. The allelic variant has at least 85% identity to SEQ ID NO: 51, preferably at least 90% identity, 92%, 94%, 96% or more preferably at least 98% sequence identity thereto. Also, the polypeptide encoded by the portion of exon 6 of NRG1 comprises or consists of 8, 9, 10, 11, 12, 13 or 14 contiguous amino acids from SEQ ID NO: 144, or from an allelic variant SEQ ID NO: 144. The allelic variant has at least 85% identity to SEQ ID NO: 144, preferably at least 90% identity, 92%, 94%, 96% or more preferably at least 98% sequence identity thereto.

[0413] Preferably, any CADM1-NRG1 polypeptide fusion of the present disclosure includes the polypeptide sequence according to SEQ ID NO: 8, or an allelic variant thereof. SEQ ID NO: 8 contains a fusion junction between CADM1 and NRG1, which fusion is located between amino acid at position 17 (which, together with amino acids at positions 1-16, stems from CADM1) and the amino acid at position 19 (which, together with amino acids at positions 20-28 stems from NRG1). At position 18, an alanine (A, Ala) residue is present due to an unpredicted in-frame fusion of NRG1 with CADM1. Preferably, the CADM1. NRG1 polypeptide fusion includes 8, 9, 10, 11, 12, 13 or 14 contiguous amino acids from SEQ ID NO: 8, or of an allelic variant thereof, including at least the amino acids at position 17, 18 and 19 thereof.

[0414] In a preferred embodiment, there is provided a polypeptide sequence according to SEQ ID NO: 8, or a polypeptide which comprises 8, 9, 10, 11, 12, 13, 14 or all contiguous amino acids from SEQ ID NO: 8, or of an allelic variant thereof, including at least the amino acids at position 17, 18 and 19. Said polypeptide sequence has at least 85% identity to SEQ ID NO: 8, preferably at least 90% identity, 92%, 94%, 96% or more preferably at least 98% sequence identity thereto.

[0415] Preferably, any CADM1-NRG1 polypeptide fusion of the present disclosure includes the polypeptide sequence of SEQ ID NO: 8 having one or more (i.e. 1, 2, 3, 4, 5, 6, 7, 8, 9 or 10) point mutations that add, delete or substitute any of the amino acids of the polypeptide comprising SEQ ID NO: 8. Preferably, said polypeptide fusion includes the polypeptide sequence of SEQ ID NO: 8 having 1, 2, 3, 4, or 5 point mutations that add, delete or substitute any of the amino acids of the polypeptide comprising SEQ ID NO: 8. More preferably, said polynucleotide fusion includes the polypeptide sequence of SEQ ID NO: 8 polypeptide having 1, 2 or 3 point mutations that add, delete or substitute any of the amino acids of the polypeptide comprising SEQ ID NO: 8.

[0416] Preferably, the herein provided polypeptide fusion between NRG1 and CADM1 is oriented such that the part spanning the N-terminus to the fusion junction is polypeptide sequence from CADM1 and the part spanning the fusion junction to the C-terminus is NRG1 polypeptide sequence. Preferably, the NRG1 polypeptide sequence comprises or encodes an EGF-like domain. Said EGF-like domain containing CADM1-NRG1 polypeptide fusion is preferably comprised by an aberrant cell as mentioned herein.

### CD44-NRG1 Polypeptide Fusion

[0417] Also provided is a polypeptide fusion encoded by a polynucleotide which comprises a portion of exon 5 of CD44, or an allelic variant thereof, and a portion of exon 2 of NRG1, or an allelic variant thereof. The polypeptide encoded by exon 5 of CD44 preferably comprises or consists of SEQ ID NO: 84, or an allelic variant of SEQ ID NO: 84. The polypeptide encoded by exon 2 of NRG1 preferably comprises or consists of SEQ ID NO: 140, or an allelic variant of SEQ ID NO: 140. Preferably, said polypeptide fusion further includes any one or all of SEQ ID NOs: 80-83, or any allelic variant of any one of SEQ ID NOs: 80-83, and preferably further includes any one of SEQ ID NOs: 141-151, or any allelic variant of any one of SEQ ID NOs: 141-151. SEQ ID NOs: 80-83 correspond to the individual polypeptide sequences encoded by exons 1-4 of CD44, respectively. SEQ ID NOs: 141-151 correspond to the individual polypeptide sequences encoded by exons 3-13 of NRG1, respectively. Said portion of exon 2 of NRG1 may also be comprised by SEQ ID NO: 154, or an allelic variant of SEQ ID NO: 154, which sequence corresponds to the polypeptide sequence encoded by all of exons 2-13.

[0418] Preferably, the polypeptide encoded by the portion of exon 5 of CD44 comprises or consists of 8, 9, 10, 11, 12, 13 or 14 contiguous amino acids from SEQ ID NO: 84, or from an allelic variant SEQ ID NO: 84. The allelic variant has at least 85% identity to SEQ ID NO: 84, preferably at least 90% identity, 92%, 94%, 96% or more preferably at least 98% sequence identity thereto. Also, the polypeptide encoded by the portion of exon 2 of NRG1 comprises or consists of 8, 9, 10, 11, 12, 13 or 14 contiguous amino acids from SEQ ID NO: 140, or from an allelic variant SEQ ID NO: 140. The allelic variant has at least 85% identity to SEQ ID NO: 140, preferably at least 90% identity, 92%, 94%, 96% or more preferably at least 98% sequence identity thereto.

[0419] Preferably, any CD44-NRG1 polypeptide fusion of the present disclosure includes the polypeptide sequence according to SEQ ID NO: 12, or an allelic variant thereof. SEQ ID NO: 12 contains a fusion junction between CD44 and NRG1, which fusion is located between amino acid at position 17 (which, together with amino acids at positions 1-16, stems from CD44) and the amino acid at position 19 (which, together with amino acids at positions 20-36 stems from NRG1). At position 18, a threonine (T, Thr) residue is present due to an unpredicted in-frame fusion of NRG1 with CD44. Preferably, the CD44-NRG1 polypeptide fusion includes 8, 9, 10, 11, 12, 13 or 14 contiguous amino acids from SEQ ID NO: 12, or of an allelic variant thereof, including at least the amino acids at position 17, 18 and 19 thereof.

[0420] In a preferred embodiment, there is provided a polypeptide sequence according to SEQ ID NO: 12, or a polypeptide which comprises 8, 9, 10, 11, 12, 13, 14 or all contiguous amino acids from SEQ ID NO: 12, or of an allelic variant thereof, including at least the amino acids at position 17, 18 and 19. Said polypeptide sequence has at least 85% identity to SEQ ID NO: 12, preferably at least 90% identity, 92%, 94%, 96% or more preferably at least 98% sequence identity thereto.

[0421] Preferably, any CD44-NRG1 polypeptide fusion of the present disclosure includes the polypeptide sequence of SEQ ID NO: 12 having one or more (i.e. 1, 2, 3, 4, 5, 6, 7, 8, 9 or 10) point mutations that add, delete or substitute any of the amino acids of the polypeptide comprising SEQ ID NO: 12. Preferably, said polypeptide fusion includes the polypeptide sequence of SEQ ID NO: 12 having 1, 2, 3, 4, or 5 point mutations that add, delete or substitute any of the amino acids of the polypeptide comprising SEQ ID NO: 12. More preferably, said polynucleotide fusion includes the polypeptide sequence of SEQ ID NO: 12 polypeptide having 1, 2 or 3 point mutations that add, delete or substitute any of the amino acids of the polypeptide comprising SEQ ID NO: 12.

[0422] Preferably, the herein provided polypeptide fusion between NRG1 and CD44 is oriented such that the part spanning the N-terminus to the fusion junction is polypeptide sequence from CD44 and the part spanning the fusion junction to the C-terminus is NRG1 polypeptide sequence. Preferably, the NRG1 polypeptide sequence comprises or encodes an EGF-like domain. Said EGF-like domain containing CD44-NRG1 polypeptide fusion is preferably comprised by an aberrant cell as mentioned herein.

[0423] Also provided is a polypeptide fusion encoded by a polynucleotide which comprises a portion of exon 5 of CD44, or an allelic variant thereof, and a portion of exon 6 of NRG1, or an allelic variant thereof. The polypeptide encoded by exon 5 of CD44 preferably comprises or consists of SEQ ID NO: 84, or an allelic variant of SEQ ID NO: 84. The polypeptide encoded by exon 6 of NRG1 preferably comprises or consists of SEQ ID NO: 144, or an allelic variant of SEQ ID NO: 144. Preferably, said polypeptide fusion further includes any one of SEQ ID NOs: 80-83, or any allelic variant of SEQ ID NO: 80-83, and preferably further includes SEQ ID NOs: 145-151, or any allelic variant of SEQ ID NOs: 145-151. SEQ ID NOs: 80-83 correspond to the individual polypeptide sequences encoded by exons 1-4 of CD44. SEQ ID NOs: 145-151 correspond to the individual polypeptide sequences encoded by exons 7-13 of NRG1, respectively. Said portion of exon 6 of NRG1 may also be comprised by SEQ ID NO: 156, or an allelic variant of SEQ ID NO: 156, which sequence corresponds to the polypeptide sequence encoded by all of exons 6-13.

[0424] Preferably, the polypeptide encoded by the portion of exon 5 of CD44 comprises or consists of 8, 9, 10, 11, 12, 13 or 14 contiguous amino acids from SEQ ID NO: 84, or from an allelic variant SEQ ID NO: 84. The allelic variant has at least 85% identity to SEQ ID NO: 84, preferably at least 90% identity, 92%, 94%, 96% or more preferably at least 98% sequence identity thereto. Also, the polypeptide encoded by the portion of exon 6 of NRG1 comprises or consists of 8, 9, 10, 11, 12, 13 or 14 contiguous amino acids from SEQ ID NO: 144, or from an allelic variant SEQ ID NO: 144. The allelic variant has at least 85% identity to SEQ ID NO: 144, preferably at least 90% identity, 92%, 94%, 96% or more preferably at least 98% sequence identity thereto.

[0425] Preferably, any CD44-NRG1 polypeptide fusion of the present disclosure includes the polypeptide sequence according to SEQ ID NO: 762, or an allelic variant thereof. SEQ ID NO: 762 contains a fusion junction between CD44 and NRG1, which fusion is located between amino acid at position 24 (which, together with amino acids at positions 1-23, stems from CD44) and the amino acid at position 26 (which, together with amino acids at positions 27-49 stems from NRG1). At position 25, an threonine (T, Thr) residue is present due to an unpredicted in-frame fusion of NRG1 with CD44. Preferably, the CD44-NRG1 polypeptide fusion includes 8, 9, 10, 11, 12, 13 or 14 contiguous amino acids from SEQ ID NO: 762, or of an allelic variant thereof, including at least the amino acids at position 24, 25 and 26 thereof.

[0426] In a preferred embodiment, there is provided a polypeptide sequence according to SEQ ID NO: 762, or a polypeptide which comprises 8, 9, 10, 11, 12, 13, 14 or all contiguous amino acids from SEQ ID NO: 762, or of an allelic variant thereof, including at least the amino acids at position 24, 25 and 26. Said polypeptide sequence has at least 85% identity to SEQ ID NO: 762, preferably at least 90% identity, 92%, 94%, 96% or more preferably at least 98% sequence identity thereto.

[0427] Preferably, any CD44-NRG1 polypeptide fusion of the present disclosure includes the polypeptide sequence of SEQ ID NO: 762 having one or more (i.e. 1, 2, 3, 4, 5, 6, 7, 8, 9 or 10) point mutations that add, delete or substitute any of the amino acids of the polypeptide comprising SEQ ID NO: 762. Preferably, said polypeptide fusion includes the polypeptide sequence of SEQ ID NO: 762 having 1, 2, 3, 4, or 5 point mutations that add, delete or substitute any of the amino acids of the polypeptide comprising SEQ ID NO: 762. More preferably, said polynucleotide fusion includes the polypeptide sequence of SEQ ID NO: 762 having 1, 2 or 3 point mutations that add, delete or substitute any of the amino acids of the polypeptide comprising SEQ ID NO: 762.

[0428] Preferably, the herein provided polypeptide fusion between CD44 and NRG1 is oriented such that the part spanning the N-terminus to the fusion junction is polypeptide sequence from CD44 and the part spanning the fusion junction to the C-terminus is NRG1 polypeptide sequence. Preferably, the NRG1 polypeptide sequence comprises or encodes an EGF-like domain. Said EGF-like domain containing CD44-NRG1 polypeptide fusion is preferably comprised by an aberrant cell as mentioned herein.

### SLC3A2-NRG1 Polypeptide Fusion

[0429] Also provided is a polypeptide fusion encoded by a polynucleotide which comprises a portion of exon 1 of transcript version 6 of SLC3A2, or an allelic variant thereof, and a portion of exon 5 of NRG1, or an allelic variant thereof. The polypeptide encoded by exon 1 of said SLC3A2 preferably comprises or consists of SEQ ID NO: 113, or an allelic variant of SEQ ID NO: 113. The polypeptide encoded by exon 5 of NRG1 preferably comprises or consists of SEQ ID NO: 143, or an allelic variant of SEQ ID NO: 143. Preferably, said polypeptide fusion further includes any one of SEQ ID NOs: 144-151, or any allelic variant of any one of SEQ ID NOs: 144-151. SEQ ID NOs: 144-151 correspond to the individual polypeptide sequences encoded by exons 6-13 of NRG1, respectively. Said portion of exon 5 of NRG1 may also be comprised by SEQ ID NO: 158, or an allelic variant of SEQ ID NO: 158, which sequence corresponds to the polypeptide sequence encoded by all of exons 6-13 and includes an additional serine residue encoded by the most 3′ in frame triplet of exon 5.

[0430] Preferably, the polypeptide encoded by the portion of exon 1 of transcript version 6 of SLC3A2 comprises or consists of 8, 9, 10, 11, 12, 13 or 14 contiguous amino acids from SEQ ID NO: 113, or from an allelic variant SEQ ID NO: 113. The allelic variant has at least 85% identity to SEQ ID NO: 113, preferably at least 90% identity, 92%, 94%, 96% or more preferably at least 98% sequence identity thereto. In a preferred embodiment, the portion of exon 5 of NRG1 in the SLC3A2-NRG1 fusion comprises at least the amino acid at position 16 of SEQ ID NO: 143, or the corresponding amino acid of an allelic variant of SEQ ID NO: 143. The allelic variant has at least 85% identity to SEQ ID NO: 143, preferably at least 90% identity, 92%, 94%, 96% or more preferably at least 98% sequence identity thereto.

[0431] Preferably, any transcript version 6 of SLC3A2-NRG1 polypeptide fusion of the present disclosure includes the polypeptide sequence according to SEQ ID NO: 16, or an allelic variant thereof. SEQ ID NO: 16 contains a fusion junction between SLC3A2 and NRG1, which fusion is located between amino acid at position 17 (which, together with amino acids at positions 1-16, stems from SLC3A2) and the amino acid at position 19 (which, together with amino acids at positions 20-29 stems from NRG1). At position 18, an alanine (A, Ale) residue is present due to an unpredicted in-frame fusion of NRG1 with said SLC3A2 version. Preferably, the SLC3A2-NRG1 polypeptide fusion includes 8, 9, 10, 11, 12, 13 or 14 contiguous amino acids from SEQ ID NO: 16, or of an allelic variant thereof, including at least the amino acids at position 17, 18 and 19 of SEQ ID NO: 16.

[0432] In a preferred embodiment, there is provided a polypeptide sequence according to SEQ ID NO: 16, or a polypeptide which comprises 8, 9, 10, 11, 12, 13, 14 or all contiguous amino acids from SEQ ID NO: 16, or of an allelic variant thereof, including at least the amino acids at position 17, 18 and 19. Said polypeptide sequence has at least 85% identity to SEQ ID NO: 16, preferably at least 90% identity, 92%, 94%, 96% or more preferably at least 98% sequence identity thereto.

[0433] Preferably, any transcript version 6 of SLC3A2-NRG1 polypeptide fusion of the present disclosure includes the polypeptide sequence of SEQ ID NO: 16 having one or more (i.e. 1, 2, 3, 4, 5, 6, 7, 8, 9 or 10) point mutations that add, delete or substitute any of the amino acids of the polypeptide comprising SEQ ID NO: 16. Preferably, said polypeptide fusion includes the polypeptide sequence of SEQ ID NO: 16 having 1, 2, 3, 4, or 5 point mutations that add, delete or substitute any of the amino acids of the polypeptide comprising SEQ ID NO: 16. More preferably, said polynucleotide fusion includes the polypeptide sequence of SEQ ID NO: 16 polypeptide having 1, 2 or 3 point mutations that add, delete or substitute any of the amino acids of the polypeptide comprising SEQ ID NO: 16.

[0434] Preferably, the herein provided polypeptide fusion between NRG1 and transcript version 6 of SLC3A2 is oriented such that the part spanning the N-terminus to the fusion junction is polypeptide sequence from SLC3A2 and the part spanning the fusion junction to the C-terminus is NRG1 polypeptide sequence. Preferably, the NRG1 polypeptide sequence comprises or encodes an EGF-like domain. Said EGF-like domain containing SLC3A2-NRG1 polypeptide fusion is preferably comprised by an aberrant cell as mentioned herein.

[0435] Also provided is a polypeptide fusion encoded by a polynucleotide which comprises a portion of exon 2 of transcript version 3 of SLC3A2, or an allelic variant thereof, and a portion of exon 6 of NRG1, or an allelic variant thereof. The polypeptide encoded by exon 2 of said SLC3A2 preferably comprises or consists of SEQ ID NO: 470, or an allelic variant of SEQ ID NO: 470. The polypeptide encoded by exon 6 of NRG1 preferably comprises or consists of SEQ ID NO: 144, or an allelic variant of SEQ ID NO: 144. Preferably, said polypeptide fusion further includes any one of SEQ ID NOs: 469 or 145-151, or any allelic variant of SEQ ID NOs: 469 or 145-151. SEQ ID NOs: 145-151 correspond to the individual polypeptide sequences encoded by exons 7-13 of NRG1, respectively. Said portion of exon 6 of NRG1 may also be comprised by SEQ ID NO: 156, or an allelic variant of SEQ ID NO: 156, which sequence corresponds to the polypeptide sequence encoded by all of exons 6-13.

[0436] Preferably, the polypeptide encoded by the portion of exon 2 of transcript version 3 of SLC3A2 comprises or consists of 8, 9, 10, 11, 12, 13 or 14 contiguous amino acids from SEQ ID NO: 470, or from an allelic variant SEQ ID NO: 470. The allelic variant has at least 85% identity to SEQ ID NO: 470, preferably at least 90% identity, 92%, 94%, 96% or more preferably at least 98% sequence identity thereto. In a preferred embodiment, the portion of exon 6 of NRG1 in the SLC3A2-NRG1 fusion comprises or is the sequence according to SEQ ID NO: 144, or allelic variant of SEQ ID NO: 144. The allelic variant has at least 85% identity to SEQ ID NO: 144, preferably at least 90% identity, 92%, 94%, 96% or more preferably at least 98% sequence identity thereto.

[0437] Preferably, any transcript version 3 of SLC3A2-NRG1 polypeptide fusion of the present disclosure includes the polypeptide sequence according to SEQ ID NO: 455, or an allelic variant thereof. SEQ ID NO: 455 contains a fusion junction between SLC3A2 and NRG1, which fusion is located between amino acid at position 30 (which, together with amino acids at positions 1-29, stems from said SLC3A2 version) and the amino acid at position 32 (which, together with amino acids at positions 33-39 stems from NRG1). At position 31, an alanine (A, ala) residue is present due to an unpredicted in frame fusion of NRG1 with said SLC3A2 version. Preferably, the SLC3A2-NRG1 polypeptide fusion includes 8, 9, 10, 11, 12, 13 or 14 contiguous amino acids from SEQ ID NO: 455, or of an allelic variant thereof, including at least the amino acids at position 30, 31 and 32 of SEQ ID NO: 455.

[0438] In a preferred embodiment, there is provided a polypeptide sequence according to SEQ ID NO: 455, or a polypeptide which comprises 8, 9, 10, 11, 12, 13, 14 or all contiguous amino acids from SEQ ID NO: 455, or of an allelic variant thereof, including at least the amino acids at position 30, 31 and 32. Said polypeptide sequence has at least 85% identity to SEQ ID NO: 455, preferably at least 90% identity, 92%, 94%, 96% or more preferably at least 98% sequence identity thereto.

[0439] Preferably, any transcript version 3 of SLC3A2-NRG1 polypeptide fusion of the present disclosure includes the polypeptide sequence of SEQ ID NO: 455 having one or more (i.e. 1, 2, 3, 4, 5, 6, 7, 8, 9 or 10) point mutations that add, delete or substitute any of the amino acids of the polypeptide comprising SEQ ID NO: 455. Preferably, said polypeptide fusion includes the polypeptide sequence of SEQ ID NO: 455 having 1, 2, 3, 4, or 5 point mutations that add, delete or substitute any of the amino acids of the polypeptide comprising SEQ ID NO: 455. More preferably, said polynucleotide fusion includes the polypeptide sequence of SEQ ID NO: 455 polypeptide having 1, 2 or 3 point mutations that add, delete or substitute any of the amino acids of the polypeptide comprising SEQ ID NO: 455.

[0440] Preferably, the herein provided polypeptide fusion between NRG1 and transcript version 6 of SLC3A2 is oriented such that the part spanning the N-terminus to the fusion junction is polypeptide sequence from SLC3A2 and the part spanning the fusion junction to the C-terminus is NRG1 polypeptide sequence. Preferably, the NRG1 polypeptide sequence comprises or encodes an EGF-like domain. Said EGF-like domain containing SLC3A2-NRG1 polypeptide fusion is preferably comprised by an aberrant cell as mentioned herein.

### VTCN1-NRG1 Polypeptide Fusion

[0441] Also provided is a polypeptide fusion encoded by a polynucleotide which comprises a portion of exon 2 of VTCN1, or an allelic variant thereof, and a portion of exon 2 of NRG1, or an allelic variant thereof. The polypeptide encoded by exon 2 of VTCN1 preferably comprises or consists of SEQ ID NO: 176, or an allelic variant of SEQ ID NO: 176. The polypeptide encoded by exon 2 of NRG1 preferably comprises or consists of SEQ ID NO: 140, or an allelic variant of SEQ ID NO: 140. Preferably, said polypeptide fusion further includes SEQ ID NOs: 175, or any allelic variant of SEQ ID NO: 175, and preferably further includes any one of SEQ ID NOs: 141-151, or any allelic variant of any one of SEQ ID NOs: 141-151. SEQ ID NO: 175 correspond to the polypeptide sequence encoded by exon 1 of VTCN1. SEQ ID NOs: 141-151 correspond to the individual polypeptide sequences encoded by exons 3-13 of NRG1, respectively. Said portion of exon 2 of NRG1 may also be comprised by SEQ ID NO: 154, or an allelic variant of SEQ ID NO: 154, which sequence corresponds to the polypeptide sequence encoded by all of exons 2-13

[0442] Preferably, the polypeptide encoded by the portion of exon 2 of VTCN1 comprises or consists of 8, 9, 10, 11, 12, 13 or 14 contiguous amino acids from SEQ ID NO: 176, or from an allelic variant SEQ ID NO: 176. The allelic variant has at least 85% identity to SEQ ID NO: 176, preferably at least 90% identity, 92%, 94%, 96% or more preferably at least 98% sequence identity thereto. Also, the polypeptide encoded by the portion of exon 2 of NRG1 comprises or consists of 8, 9, 10, 11, 12, 13 or 14 contiguous amino acids from SEQ ID NO: 140, or from an allelic variant SEQ ID NO: 140. The allelic variant has at least 85% identity to SEQ ID NO: 140, preferably at least 90% identity, 92%, 94%, 96% or more preferably at least 98% sequence identity thereto.

[0443] Preferably, any VTCN1-NRG1 polypeptide fusion of the present disclosure includes the polypeptide sequence according to SEQ ID NO: 167, or an allelic variant thereof. SEQ ID NO: 167 contains a fusion junction between VTCN1 and NRG1, which fusion is located between amino acid at position 21 (which, together with amino acids at positions 1-20, stems from VTCN1) and the amino acid at position 23 (which, together with amino acids at positions 24-30 stems from NRG1). At position 22, an alanine (A, ala) residue is present due to an unpredicted in-frame fusion of NRG1 with VTCN1. Preferably, the VTCN1-NRG1 polypeptide fusion includes 8, 9, 10, 11, 12, 13 or 14 contiguous amino acids from SEQ ID NO: 167, or of an allelic variant thereof, including at least the amino acids at position 21, 22 and 23 thereof.

[0444] In a preferred embodiment, there is provided a polypeptide sequence according to SEQ ID NO: 167, or a polypeptide which comprises 8, 9, 10, 11, 12, 13, 14 or all contiguous amino acids from SEQ ID NO: 167, or of an allelic variant thereof, including at least the amino acids at position 21, 22 and 23. Said polypeptide sequence has at least 85% identity to SEQ ID NO: 167, preferably at least 90% identity, 92%, 94%, 96% or more preferably at least 98% sequence identity thereto.

[0445] Preferably, any VTCN1-NRG1 polypeptide fusion of the present disclosure includes the polypeptide sequence of SEQ ID NO: 167 having one or more (i.e. 1, 2, 3, 4, 5, 6, 7, 8, 9 or 10) point mutations that add, delete or substitute any of the amino acids of the polypeptide comprising SEQ ID NO: 167. Preferably, said polypeptide fusion includes the polypeptide sequence of SEQ ID NO: 167 having 1, 2, 3, 4, or 5 point mutations that add, delete or substitute any of the amino acids of the polypeptide comprising SEQ ID NO: 167. More preferably, said polynucleotide fusion includes the polypeptide sequence of SEQ ID NO: 167 having 1, 2 or 3 point mutations that add, delete or substitute any of the amino acids of the polypeptide comprising SEQ ID NO: 167.

[0446] Preferably, the herein provided polypeptide fusion between VTCN1 and NRG1 is oriented such that the part spanning the N-terminus to the fusion junction is polypeptide sequence from VTCN1 and the part spanning the fusion junction to the C-terminus is NRG1 polypeptide sequence. Preferably, the NRG1 polypeptide sequence comprises or encodes an EGF-like domain. Said EGF-like domain containing VTCN1-NRG1 polypeptide fusion is preferably comprised by an aberrant cell as mentioned herein.

### CDH1-NRG1 Polypeptide Fusion

[0447] Also provided is a polypeptide fusion encoded by a polynucleotide which comprises a portion of exon 11 of CDH1, or an allelic variant thereof, and a portion of exon 2 of NRG1, or an allelic variant thereof. The polypeptide encoded by exon 11 of CDH1 preferably comprises or consists of SEQ ID NO: 206, or an allelic variant of SEQ ID NO: 206. The polypeptide encoded by exon 2 of NRG1 preferably comprises or consists of SEQ ID NO: 140, or an allelic variant of SEQ ID NO: 140. Preferably, said polypeptide fusion further includes SEQ ID NO: 205, or any allelic variant of SEQ ID NO: 205, and preferably further includes any one of SEQ ID NOs: 141-151, or any allelic variant of any one of SEQ ID NOs: 141-151. SEQ ID NO: 205 correspond to the polypeptide sequence encoded by exon 10 of CDH1. SEQ ID NOs: 141-151 correspond to the individual polypeptide sequences encoded by exons 3-13 of NRG1, respectively. Said portion of exon 2 of NRG1 may also be comprised by SEQ ID NO: 154, or an allelic variant of SEQ ID NO: 154, which sequence corresponds to the polypeptide sequence encoded by all of exons 2-13

[0448] Preferably, the polypeptide encoded by the portion of exon 11 of CDH1 comprises or consists of 8, 9, 10, 11, 12, 13 or 14 contiguous amino acids from SEQ ID NO: 206, or from an allelic variant SEQ ID NO: 206. The allelic variant has at least 85% identity to SEQ ID NO: 206, preferably at least 90% identity, 92%, 94%, 96% or more preferably at least 98% sequence identity thereto. Also, the polypeptide encoded by the portion of exon 2 of NRG1 comprises or consists of 8, 9, 10, 11, 12, 13 or 14 contiguous amino acids from SEQ ID NO: 140, or from an allelic variant SEQ ID NO: 140. The allelic variant has at least 85% identity to SEQ ID NO: 140, preferably at least 90% identity, 92%, 94%, 96% or more preferably at least 98% sequence identity thereto.

[0449] Preferably, any CDH1-NRG1 polypeptide fusion of the present disclosure includes the polypeptide sequence according to SEQ ID NO: 187, or an allelic variant thereof. SEQ ID NO: 187 contains a fusion junction between CDH1 and NRG1, which fusion is located between amino acid at position 39 (which, together with amino acids at positions 1-38, stems from CDH1) and the amino acid at position 41 (which, together with amino acids at positions 42-49 stems from NRG1). At position 40, an alanine (A, ala) residue is present due to an unpredicted in-frame fusion of NRG1 with CDH1. Preferably, the CDH1-NRG1 polypeptide fusion includes 8, 9, 10, 11, 12, 13 or 14 contiguous amino acids from SEQ ID NO: 187, or of an allelic variant thereof, including at least the amino acids at position 39, 40 and 41 thereof.

[0450] In a preferred embodiment, there is provided a polypeptide sequence according to SEQ ID NO: 187, or a polypeptide which comprises 8, 9, 10, 11, 12, 13, 14 or all contiguous amino acids from SEQ ID NO: 187, or of an allelic variant thereof, including at least the amino acids at position 39, 40 and 41. Said polypeptide sequence has at least 85% identity to SEQ ID NO: 187, preferably at least 90% identity, 92%, 94%, 96% or more preferably at least 98% sequence identity thereto.

[0451] Preferably, any CDH1-NRG1 polypeptide fusion of the present disclosure includes the polypeptide sequence of SEQ ID NO: 187 having one or more (i.e. 1, 2, 3, 4, 5, 6, 7, 8, 9 or 10) point mutations that add, delete or substitute any of the amino acids of the polypeptide comprising SEQ ID NO: 187. Preferably, said polypeptide fusion includes the polypeptide sequence of SEQ ID NO: 187 having 1, 2, 3, 4, or 5 point mutations that add, delete or substitute any of the amino acids of the polypeptide comprising SEQ ID NO: 187. More preferably, said polynucleotide fusion includes the polypeptide sequence of SEQ ID NO: 187 having 1, 2 or 3 point mutations that add, delete or substitute any of the amino acids of the polypeptide comprising SEQ ID NO: 187.

[0452] Preferably, the herein provided polypeptide fusion between CDH1 and NRG1 is oriented such that the part spanning the N-terminus to the fusion junction is polypeptide sequence from CDH1 and the part spanning the fusion junction to the C-terminus is NRG1 polypeptide sequence. Preferably, the NRG1 polypeptide sequence comprises or encodes an EGF-like domain. Said EGF-like domain containing CDH1-NRG1 polypeptide fusion is preferably comprised by an aberrant cell as mentioned herein.

### CXADR-NRG1 Polypeptide Fusion

[0453] Also provided is a polypeptide fusion encoded by a polynucleotide which comprises a portion of exon 1 of CXADR, or an allelic variant thereof, and a portion of exon 2 of NRG1, or an allelic variant thereof. The polypeptide encoded by exon 1 of CXADR preferably comprises or consists of SEQ ID NO: 225, or an allelic variant of SEQ ID NO: 225. The polypeptide encoded by exon 2 of NRG1 preferably comprises or consists of SEQ ID NO: 140, or an allelic variant of SEQ ID NO: 140. Preferably, said polypeptide fusion further includes SEQ ID NOs: 141-151, or any allelic variant of SEQ ID NOs: 141-151. SEQ ID NO: 225 correspond to the polypeptide sequence encoded by exon 1 of CXADR. SEQ ID NOs: 141-151 correspond to the individual polypeptide sequences encoded by exons 3-13 of NRG1, respectively. Said portion of exon 2 of NRG1 may also be comprised by SEQ ID NO: 154, or an allelic variant of SEQ ID NO: 154, which sequence corresponds to the polypeptide sequence encoded by all of exons 2-13.

[0454] Preferably, the polypeptide encoded by the portion of exon 1 of CXADR comprises or consists of 8, 9, 10, 11, 12, 13 or 14 contiguous amino acids from SEQ ID NO: 225, or from an allelic variant SEQ ID NO: 225. The allelic variant has at least 85% identity to SEQ ID NO: 225, preferably at least 90% identity, 92%, 94%, 96% or more preferably at least 98% sequence identity thereto. Also, the polypeptide encoded by the portion of exon 2 of NRG1 comprises or consists of 8, 9, 10, 11, 12, 13 or 14 contiguous amino acids from SEQ ID NO: 140, or from an allelic variant SEQ ID NO: 140. The allelic variant has at least 85% identity to SEQ ID NO: 140, preferably at least 90% identity, 92%, 94%, 96% or more preferably at least 98% sequence identity thereto.

[0455] Preferably, any CXADR-NRG1 polypeptide fusion of the present disclosure includes the polypeptide sequence according to SEQ ID NO: 218, or an allelic variant thereof. SEQ ID NO: 218 contains a fusion junction between CXADR and NRG1, which fusion is located between amino acid at position 14 (which, together with amino acids at positions 1-13, stems from CXADR) and the amino acid at position 16 (which, together with amino acids at positions 17-33 stems from NRG1). At position 15, an alanine (A, ala) residue is present due to an unpredicted in-frame fusion of NRG1 with CXADR. Preferably, the CXADR-NRG1 polypeptide fusion includes 8, 9, 10, 11, 12, 13 or 14 contiguous amino acids from SEQ ID NO: 218, or of an allelic variant thereof, including at least the amino acids at position 14, 15 and 16 thereof.

[0456] In a preferred embodiment, there is provided a polypeptide sequence according to SEQ ID NO: 218, or a polypeptide which comprises 8, 9, 10, 11, 12, 13, 14 or all contiguous amino acids from SEQ ID NO: 218, or of an allelic variant thereof, including at least the amino acids at position 14, 15 and 16. Said polypeptide sequence has at least 85% identity to SEQ ID NO: 218, preferably at least 90% identity, 92%, 94%, 96% or more preferably at least 98% sequence identity thereto.

[0457] Preferably, any CXADR-NRG1 polypeptide fusion of the present disclosure includes the polypeptide sequence of SEQ ID NO: 218 having one or more (i.e. 1, 2, 3, 4, 5, 6, 7, 8, 9 or 10) point mutations that add, delete or substitute any of the amino acids of the polypeptide comprising SEQ ID NO: 218. Preferably, said polypeptide fusion includes the polypeptide sequence of SEQ ID NO: 218 having 1, 2, 3, 4, or 5 point mutations that add, delete or substitute any of the amino acids of the polypeptide comprising SEQ ID NO: 218. More preferably, said polynucleotide fusion includes the polypeptide sequence of SEQ ID NO: 218 having 1, 2 or 3 point mutations that add, delete or substitute any of the amino acids of the polypeptide comprising SEQ ID NO: 218.

[0458] Preferably, the herein provided polypeptide fusion between CXADR and NRG1 is oriented such that the part spanning the N-terminus to the fusion junction is polypeptide sequence from CXADR and the part spanning the fusion junction to the C-terminus is NRG1 polypeptide sequence. Preferably, the NRG1 polypeptide sequence comprises or encodes an EGF-like domain. Said EGF-like domain containing CXADR-NRG1 polypeptide fusion is preferably comprised by an aberrant cell as mentioned herein.

### GTF2E2-NRG1 Polypeptide Fusion

[0459] Also provided is a polypeptide fusion encoded by a polynucleotide which comprises a portion of exon 2 of GTF2E2, or an allelic variant thereof, and a portion of exon 2 of NRG1, or an allelic variant thereof. The polypeptide encoded by exon 2 of GTF2E2 preferably comprises or consists of SEQ ID NO: 244, or an allelic variant of SEQ ID NO: 244. The polypeptide encoded by exon 2 of NRG1 preferably comprises or consists of SEQ ID NO: 140, or an allelic variant of SEQ ID NO: 140. Preferably, said polypeptide fusion further includes SEQ ID NOs: 141-151, or any allelic variant of SEQ ID NOs: 141-151. SEQ ID NOs: 141-151 correspond to the individual polypeptide sequences encoded by exons 3-13 of NRG1, respectively. Said portion of exon 2 of NRG1 may also be comprised by SEQ ID NO: 154, or an allelic variant of SEQ ID NO: 154, which sequence corresponds to the polypeptide sequence encoded by all of exons 2-13

[0460] Preferably, the polypeptide encoded by the portion of exon 2 of GTF2E2 comprises or consists of 8, 9, 10, 11, 12, 13 or 14 contiguous amino acids from SEQ ID NO: 244, or from an allelic variant SEQ ID NO: 244. The allelic variant has at least 85% identity to SEQ ID NO: 244, preferably at least 90% identity, 92%, 94%, 96% or more preferably at least 98% sequence identity thereto. Also, the polypeptide encoded by the portion of exon 2 of NRG1 comprises or consists of 8, 9, 10, 11, 12, 13 or 14 contiguous amino acids from SEQ ID NO: 140, or from an allelic variant SEQ ID NO: 140. The allelic variant has at least 85% identity to SEQ ID NO: 140, preferably at least 90% identity, 92%, 94%, 96% or more preferably at least 98% sequence identity thereto.

[0461] Preferably, any GTF2E2-NRG1 polypeptide fusion of the present disclosure includes the polypeptide sequence according to SEQ ID NO: 234, or an allelic variant thereof. SEQ ID NO: 234 contains a fusion junction between GTF2E2 and NRG1, which fusion is located between amino acid at position 46 (which, together with amino acids at positions 1-45, stems from GTF2E2) and the amino acid at position 48 (which, together with amino acids at positions 49-88 stems from NRG1). At position 47, an alanine (A, ala) residue is present due to an unpredicted in-frame fusion of NRG1 with GTF2E2. Preferably, the GTF2E2-NRG1 polypeptide fusion includes 8, 9, 10, 11, 12, 13 or 14 contiguous amino acids from SEQ ID NO: 234, or of an allelic variant thereof, including at least the amino acids at position 46, 47 and 48 thereof.

[0462] In a preferred embodiment, there is provided a polypeptide sequence according to SEQ ID NO: 234, or a polypeptide which comprises 8, 9, 10, 11, 12, 13, 14 or all contiguous amino acids from SEQ ID NO: 234, or of an allelic variant thereof, including at least the amino acids at position 46, 47 and 48. Said polypeptide sequence has at least 85% identity to SEQ ID NO: 234, preferably at least 90% identity, 92%, 94%, 96% or more preferably at least 98% sequence identity thereto.

[0463] Preferably, any GTF2E2-NRG1 polypeptide fusion of the present disclosure includes the polypeptide sequence of SEQ ID NO: 234 having one or more (i.e. 1, 2, 3, 4, 5, 6, 7, 8, 9 or 10) point mutations that add, delete or substitute any of the amino acids of the polypeptide comprising SEQ ID NO: 234. Preferably, said polypeptide fusion includes the polypeptide sequence of SEQ ID NO: 234 having 1, 2, 3, 4, or 5 point mutations that add, delete or substitute any of the amino acids of the polypeptide comprising SEQ ID NO: 234. More preferably, said polynucleotide fusion includes the polypeptide sequence of SEQ ID NO: 234 having 1, 2 or 3 point mutations that add, delete or substitute any of the amino acids of the polypeptide comprising SEQ ID NO: 234.

[0464] Preferably, the herein provided polypeptide fusion between GTF2E2 and NRG1 is oriented such that the part spanning the N-terminus to the fusion junction is polypeptide sequence from GTF2E2 and the part spanning the fusion junction to the C-terminus is NRG1 polypeptide sequence. Preferably, the NRG1 polypeptide sequence comprises or encodes an EGF-like domain. Said EGF-like domain containing GTF2E2-NRG1 polypeptide fusion is preferably comprised by an aberrant cell as mentioned herein.

### CSMD1-NRG1 Polypeptide Fusion

[0465] Also provided is a polypeptide fusion encoded by a polynucleotide which comprises a portion of exon 23 of CSMD1, or an allelic variant thereof, and a portion of exon 6 of NRG1, or an allelic variant thereof. The polypeptide encoded by exon 23 of CSMD1 preferably comprises or consists of SEQ ID NO: 305, or an allelic variant of SEQ ID NO: 305. The polypeptide encoded by exon 6 of NRG1 preferably comprises or consists of SEQ ID NO: 144, or an allelic variant of SEQ ID NO: 144. Preferably, said polypeptide fusion further includes any one of SEQ ID NOs: 283-304, or any allelic variant of SEQ ID NOs: 283-304, and preferably further includes SEQ ID NOs: 145-151, or any allelic variant of SEQ ID NOs: 145-151. SEQ ID NOs: 283-304 correspond to the individual polypeptide sequences encoded by exons 1-22 of CSMD1, respectively. SEQ ID NOs: 145-151 correspond to the individual polypeptide sequences encoded by exons 7-13 of NRG1, respectively. Said portion of exon 6 of NRG1 may also be comprised by SEQ ID NO: 156, or an allelic variant of SEQ ID NO: 156, which sequence corresponds to the polypeptide sequence encoded by all of exons 6-13.

[0466] Preferably, the polypeptide encoded by the portion of exon 23 of CSMD1 comprises or consists of 8, 9, 10, 11, 12, 13 or 14 contiguous amino acids from SEQ ID NO: 305, or from an allelic variant SEQ ID NO: 305. The allelic variant has at least 85% identity to SEQ ID NO: 305, preferably at least 90% identity, 92%, 94%, 96% or more preferably at least 98% sequence identity thereto. Also, the polypeptide encoded by the portion of exon 6 of NRG1 comprises or consists of 8, 9, 10, 11, 12, 13 or 14 contiguous amino acids from SEQ ID NO: 144, or from an allelic variant SEQ ID NO: 144. The allelic variant has at least 85% identity to SEQ ID NO: 144, preferably at least 90% identity, 92%, 94%, 96% or more preferably at least 98% sequence identity thereto.

[0467] Preferably, any CSMD1-NRG1 polypeptide fusion of the present disclosure includes the polypeptide sequence according to SEQ ID NO: 256, or an allelic variant thereof. SEQ ID NO: 256 contains a fusion junction between CSMD1 and NRG1, which fusion is located between amino acid at position 29 (which, together with amino acids at positions 1-28, stems from CSMD1) and the amino acid at position 31 (which, together with amino acids at positions 32-50 stems from NRG1). At position 30, a Threonine (T, thr) residue is present due to an unpredicted in-frame fusion of NRG1 with CSMD1. Preferably, the CSMD1-NRG1 polypeptide fusion includes 8, 9, 10, 11, 12, 13 or 14 contiguous amino acids from SEQ ID NO: 256, or of an allelic variant thereof, including at least the amino acids at position 29, 30 and 31 thereof.

[0468] In a preferred embodiment, there is provided a polypeptide sequence according to SEQ ID NO: 256, or a polypeptide which comprises 8, 9, 10, 11, 12, 13, 14 or all contiguous amino acids from SEQ ID NO: 256, or of an allelic variant thereof, including at least the amino acids at position 29, 30 and 31. Said polypeptide sequence has at least 85% identity to SEQ ID NO: 256, preferably at least 90% identity, 92%, 94%, 96% or more preferably at least 98% sequence identity thereto.

[0469] Preferably, any CSMD1-NRG1 polypeptide fusion of the present disclosure includes the polypeptide sequence of SEQ ID NO: 256 having one or more (i.e. 1, 2, 3, 4, 5, 6, 7, 8, 9 or 10) point mutations that add, delete or substitute any of the amino acids of the polypeptide comprising SEQ ID NO: 256. Preferably, said polypeptide fusion includes the polypeptide sequence of SEQ ID NO: 256 having 1, 2, 3, 4, or 5 point mutations that add, delete or substitute any of the amino acids of the polypeptide comprising SEQ ID NO: 256. More preferably, said polynucleotide fusion includes the polypeptide sequence of SEQ ID NO: 256 having 1, 2 or 3 point mutations that add, delete or substitute any of the amino acids of the polypeptide comprising SEQ ID NO: 256.

[0470] Preferably, the herein provided polypeptide fusion between CSMD1 and NRG1 is oriented such that the part spanning the N-terminus to the fusion junction is polypeptide sequence from CSMD1 and the part spanning the fusion junction to the C-terminus is NRG1 polypeptide sequence. Preferably, the NRG1 polypeptide sequence comprises or encodes an EGF-like domain. Said EGF-like domain containing CSMD1-NRG1 polypeptide fusion is preferably comprised by an aberrant cell as mentioned herein.

### PTN-NRG1 Polypeptide Fusion

[0471] Also provided is a polypeptide fusion encoded by a polynucleotide which comprises a portion of exon 4 of PTN, or an allelic variant thereof, and a portion of exon 2 of NRG1, or an allelic variant thereof. The polypeptide encoded by exon 4 of PTN preferably comprises or consists of SEQ ID NO: 323, or an allelic variant of SEQ ID NO: 323. The polypeptide encoded by exon 2 of NRG1 preferably comprises or consists of SEQ ID NO: 140, or an allelic variant of SEQ ID NO: 140. Preferably, said polypeptide fusion further includes SEQ ID NO: 321 and/or 322, or any allelic variant of SEQ ID NO: 321 and/or 322, and preferably further includes SEQ ID NOs: 141-151, or any allelic variant of SEQ ID NOs: 141-151. SEQ ID NO: 321, 322 and 323 correspond to the individual polypeptide sequences encoded by exons 2,3,4 of PTN, respectively. SEQ ID NOs: 141-151 correspond to the individual polypeptide sequences encoded by exons 3-13 of NRG1, respectively. Said portion of exon 2 of NRG1 may also be comprised by SEQ ID NO: 154, or an allelic variant of SEQ ID NO: 154, which sequence corresponds to the polypeptide sequence encoded by all of exons 2-13.

[0472] Preferably, the polypeptide encoded by the portion of exon 4 of PTN comprises or consists of 8, 9, 10, 11, 12, 13 or 14 contiguous amino acids from SEQ ID NO: 323, or from an allelic variant SEQ ID NO: 323. The allelic variant has at least 85% identity to SEQ ID NO: 323, preferably at least 90% identity, 92%, 94%, 96% or more preferably at least 98% sequence identity thereto. Also, the polypeptide encoded by the portion of exon 2 of NRG1 comprises or consists of 8, 9, 10, 11, 12, 13 or 14 contiguous amino acids from SEQ ID NO: 140, or from an allelic variant SEQ ID NO: 140. The allelic variant has at least 85% identity to SEQ ID NO: 140, preferably at least 90% identity, 92%, 94%, 96% or more preferably at least 98% sequence identity thereto.

[0473] Preferably, any PTN-NRG1 polypeptide fusion of the present disclosure includes the polypeptide sequence according to SEQ ID NO: 314, or an allelic variant thereof. SEQ ID NO: 314 contains a fusion junction between PTN and NRG1, which fusion is located between amino acid at position 33 (which, together with amino acids at positions 1-32, stems from PTN) and the amino acid at position 35 (which, together with amino acids at positions 36-67 stems from NRG1). At position 34, an alanine (A, ala) residue is present due to an unpredicted in-frame fusion of NRG1 with PTN. Preferably, the PTN-NRG1 polypeptide fusion includes 8, 9, 10, 11, 12, 13 or 14 contiguous amino acids from SEQ ID NO: 314, or of an allelic variant thereof, including at least the amino acids at position 33, 34 and 35 thereof.

[0474] In a preferred embodiment, there is provided a polypeptide sequence according to SEQ ID NO: 314, or a polypeptide which comprises 8, 9, 10, 11, 12, 13, 14 or all contiguous amino acids from SEQ ID NO: 314, or of an allelic variant thereof, including at least the amino acids at position 33, 34 and 35. Said polypeptide sequence has at least 85% identity to SEQ ID NO: 314, preferably at least 90% identity, 92%, 94%, 96% or more preferably at least 98% sequence identity thereto.

[0475] Preferably, any PTN-NRG1 polypeptide fusion of the present disclosure includes the polypeptide sequence of SEQ ID NO: 314 having one or more (i.e. 1, 2, 3, 4, 5, 6, 7, 8, 9 or 10) point mutations that add, delete or substitute any of the amino acids of the polypeptide comprising SEQ ID NO: 314. Preferably, said polypeptide fusion includes the polypeptide sequence of SEQ ID NO: 314 having 1, 2, 3, 4, or 5 point mutations that add, delete or substitute any of the amino acids of the polypeptide comprising SEQ ID NO: 314. More preferably, said polynucleotide fusion includes the polypeptide sequence of SEQ ID NO: 314 having 1, 2 or 3 point mutations that add, delete or substitute any of the amino acids of the polypeptide comprising SEQ ID NO: 314.

[0476] Preferably, the herein provided polypeptide fusion between PTN and NRG1 is oriented such that the part spanning the N-terminus to the fusion junction is polypeptide sequence from PTN and the part spanning the fusion junction to the C-terminus is NRG1 polypeptide sequence. Preferably, the NRG1 polypeptide sequence comprises or encodes an EGF-like domain. Said EGF-like domain containing PTN-NRG1 polypeptide fusion is preferably comprised by an aberrant cell as mentioned herein.

### ST14-NRG1 Polypeptide Fusion

[0477] Also provided is a polypeptide fusion encoded by a polynucleotide which comprises a portion of exon 11 of ST14, or an allelic variant thereof, and a portion of exon 6 of NRG1, or an allelic variant thereof. The polypeptide encoded by exon 11 of ST14 preferably comprises or consists of SEQ ID NO: 362, or an allelic variant of SEQ ID NO: 362. The polypeptide encoded by exon 6 of NRG1 preferably comprises or consists of SEQ ID NO: 144, or an allelic variant of SEQ ID NO: 144. Preferably, said polypeptide fusion further includes any one of SEQ ID NOs: 352-361, or any allelic variant of SEQ ID NO: 352-361, and preferably further includes SEQ ID NOs: 145-151, or any allelic variant of SEQ ID NOs: 145-151. SEQ ID NOs: 352-361 correspond to the individual polypeptide sequences encoded by exons 1-10 of ST14, respectively. SEQ ID NOs: 145-151 correspond to the individual polypeptide sequences encoded by exons 7-13 of NRG1, respectively. Said portion of exon 6 of NRG1 may also be comprised by SEQ ID NO: 156, or an allelic variant of SEQ ID NO: 156, which sequence corresponds to the polypeptide sequence encoded by all of exons 6-13.

[0478] Preferably, the polypeptide encoded by the portion of exon 11 of ST14 comprises or consists of 8, 9, 10, 11, 12, 13 or 14 contiguous amino acids from SEQ ID NO: 362, or from an allelic variant SEQ ID NO: 362. The allelic variant has at least 85% identity to SEQ ID NO: 362, preferably at least 90% identity, 92%, 94%, 96% or more preferably at least 98% sequence identity thereto. Also, the polypeptide encoded by the portion of exon 6 of NRG1 comprises or consists of 8, 9, 10, 11, 12, 13 or 14 contiguous amino acids from SEQ ID NO: 144, or from an allelic variant SEQ ID NO: 144. The allelic variant has at least 85% identity to SEQ ID NO: 144, preferably at least 90% identity, 92%, 94%, 96% or more preferably at least 98% sequence identity thereto.

[0479] Preferably, any ST14-NRG1 polypeptide fusion of the present disclosure includes the polypeptide sequence according to SEQ ID NO: 331, or an allelic variant thereof. SEQ ID NO: 331 contains a fusion junction between ST14 and NRG1, which fusion is located between amino acid at position 31 (which, together with amino acids at positions 1-30, stems from ST14) and the amino acid at position 33 (which, together with amino acids at positions 34-60 stems from NRG1). At position 32, a proline (P, pro) residue is present due to an unpredicted in-frame fusion of NRG1 with ST14. Preferably, the ST14-NRG1 polypeptide fusion includes 8, 9, 10, 11, 12, 13 or 14 contiguous amino acids from SEQ ID NO: 331, or of an allelic variant thereof, including at least the amino acids at position 31, 32 and 33 thereof.

[0480] In a preferred embodiment, there is provided a polypeptide sequence according to SEQ ID NO: 331, or a polypeptide which comprises 8, 9, 10, 11, 12, 13, 14 or all contiguous amino acids from SEQ ID NO: 331, or of an allelic variant thereof, including at least the amino acids at position 31, 32 and 33. Said polypeptide sequence has at least 85% identity to SEQ ID NO: 455, preferably at least 90% identity, 92%, 94%, 96% or more preferably at least 98% sequence identity thereto.

[0481] Preferably, any ST14-NRG1 polypeptide fusion of the present disclosure includes the polypeptide sequence of SEQ ID NO: 331 having one or more (i.e. 1, 2, 3, 4, 5, 6, 7, 8, 9 or 10) point mutations that add, delete or substitute any of the amino acids of the polypeptide comprising SEQ ID NO: 331. Preferably, said polypeptide fusion includes the polypeptide sequence of SEQ ID NO: 331 having 1, 2, 3, 4, or 5 point mutations that add, delete or substitute any of the amino acids of the polypeptide comprising SEQ ID NO: 331. More preferably, said polynucleotide fusion includes the polypeptide sequence of SEQ ID NO: 331 having 1, 2 or 3 point mutations that add, delete or substitute any of the amino acids of the polypeptide comprising SEQ ID NO: 331.

[0482] Preferably, the herein provided polypeptide fusion between ST14 and NRG1 is oriented such that the part spanning the N-terminus to the fusion junction is polypeptide sequence from ST14 and the part spanning the fusion junction to the C-terminus is NRG1 polypeptide sequence. Preferably, the NRG1 polypeptide sequence comprises or encodes an EGF-like domain. Said EGF-like domain containing ST14-NRG1 polypeptide fusion is preferably comprised by an aberrant cell as mentioned herein.

### THBS1-NRG1 Polypeptide Fusion

[0483] Also provided is a polypeptide fusion encoded by a polynucleotide which comprises a portion of exon 9 of THBS1, or an allelic variant thereof, and a portion of exon 6 of NRG1, or an allelic variant thereof. The polypeptide encoded by exon 9 of THBS1 preferably comprises or consists of SEQ ID NO: 396, or an allelic variant of SEQ ID NO: 396. The polypeptide encoded by exon 6 of NRG1 preferably comprises or consists of SEQ ID NO: 144, or an allelic variant of SEQ ID NO: 144. Preferably, said polypeptide fusion further includes any one of SEQ ID NOs: 389-395, or any allelic variant of SEQ ID NO: 389-395, and preferably further includes SEQ ID NOs: 145-151, or any allelic variant of SEQ ID NOs: 145-151. SEQ ID NO: 389-395 correspond to the individual polypeptide sequences encoded by exons 2-8 of THBS1, respectively. SEQ ID NOs: 145-151 correspond to the individual polypeptide sequences encoded by exons 7-13 of NRG1, respectively. Said portion of exon 6 of NRG1 may also be comprised by SEQ ID NO: 156, or an allelic variant of SEQ ID NO: 156, which sequence corresponds to the polypeptide sequence encoded by all of exons 6-13.

[0484] Preferably, the polypeptide encoded by the portion of exon 9 of THBS1 comprises or consists of 8, 9, 10, 11, 12, 13 or 14 contiguous amino acids from SEQ ID NO: 396, or from an allelic variant SEQ ID NO: 396. The allelic variant has at least 85% identity to SEQ ID NO: 396, preferably at least 90% identity, 92%, 94%, 96% or more preferably at least 98% sequence identity thereto. Also, the polypeptide encoded by the portion of exon 6 of NRG1 comprises or consists of 8, 9, 10, 11, 12, 13 or 14 contiguous amino acids from SEQ ID NO: 144, or from an allelic variant SEQ ID NO: 144. The allelic variant has at least 85% identity to SEQ ID NO: 144, preferably at least 90% identity, 92%, 94%, 96% or more preferably at least 98% sequence identity thereto.

[0485] Preferably, any THBS1-NRG1 polypeptide fusion of the present disclosure includes the polypeptide sequence according to SEQ ID NO: 377, or an allelic variant thereof. SEQ ID NO: 377 contains a fusion junction between THBS1 and NRG1, which fusion is located between amino acid at position 18 (which, together with amino acids at positions 1-16, stems from THBS1) and the amino acid at position 20 (which, together with amino acids at positions 20-48 stems from NRG1). At position 19, a threonine (T, the) residue is present due to an unpredicted in-frame fusion of NRG1 with THBS1. Preferably, the THBS1-NRG1 polypeptide fusion includes 8, 9, 10, 11, 12, 13 or 14 contiguous amino acids from SEQ ID NO: 377, or of an allelic variant thereof, including at least the amino acids at position 18, 19 and 20 thereof.

[0486] In a preferred embodiment, there is provided a polypeptide sequence according to SEQ ID NO: 377, or a polypeptide which comprises 8, 9, 10, 11, 12, 13, 14 or all contiguous amino acids from SEQ ID NO: 377, or of an allelic variant thereof, including at least the amino acids at position 18, 19 and 20. Said polypeptide sequence has at least 85% identity to SEQ ID NO: 377, preferably at least 90% identity, 92%, 94%, 96% or more preferably at least 98% sequence identity thereto.

[0487] Preferably, any THBS1-NRG1 polypeptide fusion of the present disclosure includes the polypeptide sequence of SEQ ID NO: 377 having one or more (i.e. 1, 2, 3, 4, 5, 6, 7, 8, 9 or 10) point mutations that add, delete or substitute any of the amino acids of the polypeptide comprising SEQ ID NO: 377. Preferably, said polypeptide fusion includes the polypeptide sequence of SEQ ID NO: 377 having 1, 2, 3, 4, or 5 point mutations that add, delete or substitute any of the amino acids of the polypeptide comprising SEQ ID NO: 377. More preferably, said polynucleotide fusion includes the polypeptide sequence of SEQ ID NO: 377 having 1, 2 or 3 point mutations that add, delete or substitute any of the amino acids of the polypeptide comprising SEQ ID NO: 377.

[0488] Preferably, the herein provided polypeptide fusion between THBS1 and NRG1 is oriented such that the part spanning the N-terminus to the fusion junction is polypeptide sequence from THBS1 and the part spanning the fusion junction to the C-terminus is NRG1 polypeptide sequence. Preferably, the NRG1 polypeptide sequence comprises or encodes an EGF-like domain. Said EGF-like domain containing THBS1-NRG1 polypeptide fusion is preferably comprised by an aberrant cell as mentioned herein.

### AGRN-NRG1 Polypeptide Fusion

[0489] Also provided is a polypeptide fusion encoded by a polynucleotide which comprises a portion of exon 12 of AGRN, or an allelic variant thereof, and a portion of exon 6 of NRG1, or an allelic variant thereof. The polypeptide encoded by exon 12 of AGRN preferably comprises or consists of SEQ ID NO: 430, or an allelic variant of SEQ ID NO: 430. The polypeptide encoded by exon 6 of NRG1 preferably comprises or consists of SEQ ID NO: 144, or an allelic variant of SEQ ID NO: 144. Preferably, said polypeptide fusion further includes any one of SEQ ID NOs: 419-429, or any allelic variant of SEQ ID NO: 419-429, and preferably further includes SEQ ID NOs: 145-151, or any allelic variant of SEQ ID NOs: 145-151. SEQ ID NOs: 419-429 correspond to the individual polypeptide sequences encoded by exons 1-11 of AGRN. SEQ ID NOs: 145-151 correspond to the individual polypeptide sequences encoded by exons 7-13 of NRG1, respectively. Said portion of exon 6 of NRG1 may also be comprised by SEQ ID NO: 156, or an allelic variant of SEQ ID NO: 156, which sequence corresponds to the polypeptide sequence encoded by all of exons 6-13.

[0490] Preferably, the polypeptide encoded by the portion of exon 12 of AGRN comprises or consists of 8, 9, 10, 11, 12, 13 or 14 contiguous amino acids from SEQ ID NO: 430, or from an allelic variant SEQ ID NO: 430. The allelic variant has at least 85% identity to SEQ ID NO: 430, preferably at least 90% identity, 92%, 94%, 96% or more preferably at least 98% sequence identity thereto. Also, the polypeptide encoded by the portion of exon 6 of NRG1 comprises or consists of 8, 9, 10, 11, 12, 13 or 14 contiguous amino acids from SEQ ID NO: 144, or from an allelic variant SEQ ID NO: 144. The allelic variant has at least 85% identity to SEQ ID NO: 1440, preferably at least 90% identity, 92%, 94%, 96% or more preferably at least 98% sequence identity thereto.

[0491] Preferably, any AGRN-NRG1 polypeptide fusion of the present disclosure includes the polypeptide sequence according to SEQ ID NO: 404, or an allelic variant thereof. SEQ ID NO: 404 contains a fusion junction between AGRN and NRG1, which fusion is located between amino acid at position 35 (which, together with amino acids at positions 1-34, stems from AGRN) and the amino acid at position 37 (which, together with amino acids at positions 38-69 stems from NRG1). At position 36, an alanine (A, ala) residue is present due to an unpredicted in frame fusion of NRG1 with AGRN. Preferably, the AGRN-NRG1 polypeptide fusion includes 8, 9, 10, 11, 12, 13 or 14 contiguous amino acids from SEQ ID NO: 404, or of an allelic variant thereof, including at least the amino acids at position 35, 36 and 37 thereof.

[0492] In a preferred embodiment, there is provided a polypeptide sequence according to SEQ ID NO: 404, or a polypeptide which comprises 8, 9, 10, 11, 12, 13, 14 or all contiguous amino acids from SEQ ID NO: 404, or of an allelic variant thereof, including at least the amino acids at position 35, 36 and 37. Said polypeptide sequence has at least 85% identity to SEQ ID NO: 404, preferably at least 90% identity, 92%, 94%, 96% or more preferably at least 98% sequence identity thereto.

[0493] Preferably, any AGRN-NRG1 polypeptide fusion of the present disclosure includes the polypeptide sequence of SEQ ID NO: 404 having one or more (i.e. 1, 2, 3, 4, 5, 6, 7, 8, 9 or 10) point mutations that add, delete or substitute any of the amino acids of the polypeptide comprising SEQ ID NO: 404. Preferably, said polypeptide fusion includes the polypeptide sequence of SEQ ID NO: 404 having 1, 2, 3, 4, or 5 point mutations that add, delete or substitute any of the amino acids of the polypeptide comprising SEQ ID NO: 404. More preferably, said polynucleotide fusion includes the polypeptide sequence of SEQ ID NO: 404 having 1, 2 or 3 point mutations that add, delete or substitute any of the amino acids of the polypeptide comprising SEQ ID NO: 404.

[0494] Preferably, the herein provided polypeptide fusion between AGRN and NRG1 is oriented such that the part spanning the N-terminus to the fusion junction is polypeptide sequence from AGRN and the part spanning the fusion junction to the C-terminus is NRG1 polypeptide sequence. Preferably, the NRG1 polypeptide sequence comprises or encodes an EGF-like domain. Said EGF-like domain containing AGRN-NRG1 polypeptide fusion is preferably comprised by an aberrant cell as mentioned herein.

### PVALB-NRG1 Polypeptide Fusion

[0495] In accordance with the present disclosure, there is provided a polypeptide fusion encoded by a polynucleotide comprising a PVALB nucleic acid sequence (or a portion of a PVALB nucleic acid sequence) fused with an NRG1 nucleic acid sequence (or a portion of a NRG1 nucleic acid sequence). The PVALB nucleic acid sequence, or portion thereof, preferably encodes a sequence comprising or consisting of any one of SEQ ID NOs 445-449, or an allelic variant of any one of these SEQ ID NOs. The NRG1 nucleic acid sequence, or portion thereof, preferably encodes a sequence comprising or consisting of any one of SEQ ID NOs 139-152, or an allelic variant of any one of these SEQ ID NOs.

[0496] The PVALB allelic variant of any one of SEQ ID NOs: 445-449, preferably has at least 85% sequence identity therewith, more preferably 90%, 92%, 94%, 96% or even more preferably at least 98% sequence identity therewith. The NRG1 allelic variant of any one of SEQ ID NOs: 139-152, preferably has at least 85% sequence identity therewith, more preferably 90%, 92%, 94%, 96% or even more preferably at least 98% sequence identity therewith.

[0497] Preferably, the portion of the PVALB nucleic acid sequence of said fusion encodes a polypeptide part of PVALB which comprises or consists of 8, 9, 10, 11, 12, 13 or 14 contiguous amino acids from any one of SEQ ID NOs 445-449, or an allelic variant of any one of SEQ ID NOs 445-449. Preferably, the portion of the NRG1 nucleic acid sequence of said fusion encodes a polypeptide part of NRG1 which comprises or consists 8, 9, 10, 11, 12, 13 or 14 contiguous amino acids from of any one of SEQ ID NOs 139-152, or an allelic variant of any one of SEQ ID NOs 139-152.

[0498] Preferably, any PVALB-NRG1 polypeptide fusion of the present disclosure includes a polypeptide sequence of any one of SEQ ID NOs: 445-449 having one or more (i.e. 1, 2, 3, 4, 5, 6, 7, 8, 9 or 10) point mutations that add, delete or substitute any of the amino acids of the polypeptides of SEQ ID NOs: 445-449. Preferably, said polypeptide fusion includes a polypeptide sequence of any one of SEQ ID NOs: 445-449 having 1, 2, 3, 4, or 5 point mutations that add, delete or substitute any of the amino acids of polypeptides of SEQ ID NO: 445-449. More preferably, said polynucleotide fusion includes a polypeptide sequence of any one of SEQ ID NOs: 445-449 having 1, 2, or 3 point mutations that add, delete or substitute any of the amino acids of the polypeptides of SEQ ID NO: 445-449.

[0499] In a preferred embodiment, there is provided a polypeptide fusion encoded by a polynucleotide which comprises a portion of exon 4 of PVALB, or an allelic variant thereof, and a portion of exon 6 of NRG1, or an allelic variant thereof. The polypeptide encoded by exon 4 of PVALB preferably comprises or consists of SEQ ID NO: 447, or an allelic variant of SEQ ID NO: 447. The polypeptide encoded by exon 6 of NRG1 preferably comprises or consists of SEQ ID NO: 144, or an allelic variant of SEQ ID NO: 144. Preferably, said polypeptide fusion further includes any one of SEQ ID NOs 445 and 446, and any one of SEQ ID NOs: 145-151, or any allelic variant of SEQ ID NOs: 145-151. SEQ ID NOs: 145-151 correspond to the individual polypeptide sequences encoded by exons 7-13 of NRG1, respectively. Said portion of exon 6 of NRG1 may also be according to SEQ ID NO: 156, or an allelic variant of SEQ ID NO: 156, which sequence corresponds to the polypeptide sequence encoded by all of exons 6-13.

[0500] Preferably, the polypeptide encoded by the portion of exon 4 of PVALB comprises or consists of 8, 9, 10, 11, 12, 13 or 14 contiguous amino acids from SEQ ID NO: 447, or from an allelic variant SEQ ID NO: 447. The allelic variant has at least 85% identity to SEQ ID NO: 447, preferably at least 90% identity, 92%, 94%, 96% or more preferably at least 98% sequence identity thereto. Also, the polypeptide encoded by the portion of exon 6 of NRG1 comprises or consists of 8, 9, 10, 11, 12, 13 or 14 contiguous amino acids from SEQ ID NO: 144, or from an allelic variant SEQ ID NO: 144. The allelic variant has at least 85% identity to SEQ ID NO: 144, preferably at least 90% identity, 92%, 94%, 96% or more preferably at least 98% sequence identity thereto.

[0501] Preferably, any PVALB-NRG1 polypeptide fusion of the present disclosure includes the polypeptide sequence according to SEQ ID NO: 438, or an allelic variant thereof. SEQ ID NO: 438 contains a fusion junction between PVALB and NRG1, which fusion is located between amino acid at position 33 (which, together with amino acids at positions 1-32, stems from PVALB) and the amino acid at position 35 (which, together with amino acids at positions 36-75 stems from NRG1). At position 34, an alanine (A, Ala) residue is present due to an unpredicted in-frame fusion of NRG1 with PVALB. Preferably, the PVALB-NRG1 polypeptide fusion includes 8, 9, 10, 11, 12, 13 or 14 contiguous amino acids from SEQ ID NO: 438, or of an allelic variant thereof, including at least the amino acids at position 33, 34 and 35.

[0502] In a preferred embodiment, there is provided a polypeptide sequence according to SEQ ID NO: 438, or a polypeptide which comprises 8, 9, 10, 11, 12, 13, 14 or all contiguous amino acids from SEQ ID NO: 438, or of an allelic variant thereof, including at least the amino acids at position 33, 34 and 35. Said polypeptide sequence has at least 85% identity to SEQ ID NO: 438, preferably at least 90% identity, 92%, 94%, 96% or more preferably at least 98% sequence identity thereto.

[0503] Preferably, any PVALB-NRG1 polypeptide fusion of the present disclosure includes the polypeptide sequence of SEQ ID NO: 438 having one or more (i.e. 1, 2, 3, 4, 5, 6, 7, 8, 9 or 10) point mutations that add, delete or substitute any of the amino acids of the polypeptide comprising SEQ ID NO: 438. Preferably, said polypeptide fusion includes the polypeptide sequence of SEQ ID NO: 438 having 1, 2, 3, 4, or 5 point mutations that add, delete or substitute any of the amino acids of the polypeptide comprising SEQ ID NO: 438. More preferably, said polynucleotide fusion includes the polypeptide sequence of SEQ ID NO: 438 polypeptide having 1, 2 or 3 point mutations that add, delete or substitute any of the amino acids of the polypeptide comprising SEQ ID NO: 438.

[0504] Preferably, the herein provided polypeptide fusion between NRG1 and PVALB is oriented such that the part spanning the N-terminus to the fusion junction is polypeptide sequence from PVALB and the part spanning the fusion junction to the C-terminus is NRG1 polypeptide sequence. Preferably, the NRG1 polypeptide sequence comprises or encodes an EGF-like domain. Said EGF-like domain containing PVALB-NRG1 polypeptide fusion is preferably comprised by an aberrant cell as mentioned herein.

### APP-NRG1 Polypeptide Fusion

[0505] Also provided is a polypeptide fusion encoded by a polynucleotide which comprises a portion of exon 14 of APP, or an allelic variant thereof, and a portion of exon 6 of NRG1, or an allelic variant thereof. The polypeptide encoded by exon 14 of APP preferably comprises or consists of SEQ ID NO: 519, or an allelic variant of SEQ ID NO: 519. The polypeptide encoded by exon 6 of NRG1 preferably comprises or consists of SEQ ID NO: 144, or an allelic variant of SEQ ID NO: 144. Preferably, said polypeptide fusion further includes any one of SEQ ID NOs: 506-518, or any allelic variant of SEQ ID NO: 506-518, and preferably further includes SEQ ID NOs: 145-151, or any allelic variant of SEQ ID NOs: 145-151. SEQ ID NOs: 506-518 correspond to the individual polypeptide sequences encoded by exons 1-13 of APP. SEQ ID NOs: 145-151 correspond to the individual polypeptide sequences encoded by exons 7-13 of NRG1, respectively. Said portion of exon 6 of NRG1 may also be comprised by SEQ ID NO: 156, or an allelic variant of SEQ ID NO: 156, which sequence corresponds to the polypeptide sequence encoded by all of exons 6-13.

[0506] Preferably, the polypeptide encoded by the portion of exon 14 of APP comprises or consists of 8, 9, 10, 11, 12, 13 or 14 contiguous amino acids from SEQ ID NO: 519, or from an allelic variant SEQ ID NO: 519. The allelic variant has at least 85% identity to SEQ ID NO: 519, preferably at least 90% identity, 92%, 94%, 96% or more preferably at least 98% sequence identity thereto. Also, the polypeptide encoded by the portion of exon 6 of NRG1 comprises or consists of 8, 9, 10, 11, 12, 13 or 14 contiguous amino acids from SEQ ID NO: 144, or from an allelic variant SEQ ID NO: 144. The allelic variant has at least 85% identity to SEQ ID NO: 144, preferably at least 90% identity, 92%, 94%, 96% or more preferably at least 98% sequence identity thereto.

[0507] Preferably, any APP-NRG1 polypeptide fusion of the present disclosure includes the polypeptide sequence according to SEQ ID NO: 487, or an allelic variant thereof. SEQ ID NO: 487 contains a fusion junction between APP and NRG1, which fusion is located between amino acid at position 17 (which, together with amino acids at positions 1-16, stems from APP) and the amino acid at position 19 (which, together with amino acids at positions 20-46 stems from NRG1). At position 18, an alanine (A, ala) residue is present due to an unpredicted in-frame fusion of NRG1 with APP. Preferably, the APP-NRG1 polypeptide fusion includes 8, 9, 10, 11, 12, 13 or 14 contiguous amino acids from SEQ ID NO: 487, or of an allelic variant thereof, including at least the amino acids at position 17, 18 and 19 thereof.

[0508] In a preferred embodiment, there is provided a polypeptide sequence according to SEQ ID NO: 487, or a polypeptide which comprises 8, 9, 10, 11, 12, 13, 14 or all contiguous amino acids from SEQ ID NO: 487, or of an allelic variant thereof, including at least the amino acids at position 17, 18 and 19. Said polypeptide sequence has at least 85% identity to SEQ ID NO: 487, preferably at least 90% identity, 92%, 94%, 96% or more preferably at least 98% sequence identity thereto.

[0509] Preferably, any APP-NRG1 polypeptide fusion of the present disclosure includes the polypeptide sequence of SEQ ID NO: 487 having one or more (i.e. 1, 2, 3, 4, 5, 6, 7, 8, 9 or 10) point mutations that add, delete or substitute any of the amino acids of the polypeptide comprising SEQ ID NO: 487. Preferably, said polypeptide fusion includes the polypeptide sequence of SEQ ID NO: 487 having 1, 2, 3, 4, or 5 point mutations that add, delete or substitute any of the amino acids of the polypeptide comprising SEQ ID NO: 487. More preferably, said polynucleotide fusion includes the polypeptide sequence of SEQ ID NO: 487 having 1, 2 or 3 point mutations that add, delete or substitute any of the amino acids of the polypeptide comprising SEQ ID NO: 487.

[0510] Preferably, the herein provided polypeptide fusion between APP and NRG1 is oriented such that the part spanning the N-terminus to the fusion junction is polypeptide sequence from APP and the part spanning the fusion junction to the C-terminus is NRG1 polypeptide sequence. Preferably, the NRG1 polypeptide sequence comprises or encodes an EGF-like domain. Said EGF-like domain containing APP-NRG1 polypeptide fusion is preferably comprised by an aberrant cell as mentioned herein.

### WRN-NRG1 Polypeptide Fusion

[0511] Also provided is a polypeptide fusion encoded by a polynucleotide which comprises a portion of exon 33 of WRN, or an allelic variant thereof, and a portion of exon 6 of NRG1, or an allelic variant thereof. The polypeptide encoded by exon 33 of WRN preferably comprises or consists of SEQ ID NO: 597, or an allelic variant of SEQ ID NO: 597. The polypeptide encoded by exon 6 of NRG1 preferably comprises or consists of SEQ ID NO: 144, or an allelic variant of SEQ ID NO: 144. Preferably, said polypeptide fusion further includes any one of SEQ ID NOs: 566-596, or any allelic variant of SEQ ID NO: 566-596, and preferably further includes SEQ ID NOs: 145-151, or any allelic variant of SEQ ID NOs: 145-151. SEQ ID NOs: 566-596 correspond to the individual polypeptide sequences encoded by exons 2-32 of WRN. SEQ ID NOs: 145-151 correspond to the individual polypeptide sequences encoded by exons 7-13 of NRG1, respectively. Said portion of exon 6 of NRG1 may also be comprised by SEQ ID NO: 156, or an allelic variant of SEQ ID NO: 156, which sequence corresponds to the polypeptide sequence encoded by all of exons 6-13.

[0512] Preferably, the polypeptide encoded by the portion of exon 33 of WRN comprises or consists of 8, 9, 10, 11, 12, 13 or 14 contiguous amino acids from SEQ ID NO: 597, or from an allelic variant SEQ ID NO: 597. The allelic variant has at least 85% identity to SEQ ID NO: 597, preferably at least 90% identity, 92%, 94%, 96% or more preferably at least 98% sequence identity thereto. Also, the polypeptide encoded by the portion of exon 6 of NRG1 comprises or consists of 8, 9, 10, 11, 12, 13 or 14 contiguous amino acids from SEQ ID NO: 144, or from an allelic variant SEQ ID NO: 144. The allelic variant has at least 85% identity to SEQ ID NO: 144, preferably at least 90% identity, 92%, 94%, 96% or more preferably at least 98% sequence identity thereto.

[0513] Preferably, any WRN-NRG1 polypeptide fusion of the present disclosure includes the polypeptide sequence according to SEQ ID NO: 528, or an allelic variant thereof. SEQ ID NO: 528 contains a fusion junction between WRN and NRG1, which fusion is located between amino acid at position 31 (which, together with amino acids at positions 1-30, stems from WRN) and the amino acid at position 33 (which, together with amino acids at positions 34-60 stems from NRG1). At position 32, an alanine (A, ala) residue is present due to an unpredicted in-frame fusion of NRG1 with WRN. Preferably, the WRN-NRG1 polypeptide fusion includes 8, 9, 10, 11, 12, 13 or 14 contiguous amino acids from SEQ ID NO: 528, or of an allelic variant thereof, including at least the amino acids at position 31, 32 and 33 thereof.

[0514] In a preferred embodiment, there is provided a polypeptide sequence according to SEQ ID NO: 528, or a polypeptide which comprises 8, 9, 10, 11, 12, 13, 14 or all contiguous amino acids from SEQ ID NO: 528, or of an allelic variant thereof, including at least the amino acids at position 31, 32 and 33. Said polypeptide sequence has at least 85% identity to SEQ ID NO: 528, preferably at least 90% identity, 92%, 94%, 96% or more preferably at least 98% sequence identity thereto.

[0515] Preferably, any WRN-NRG1 polypeptide fusion of the present disclosure includes the polypeptide sequence of SEQ ID NO: 528 having one or more (i.e. 1, 2, 3, 4, 5, 6, 7, 8, 9 or 10) point mutations that add, delete or substitute any of the amino acids of the polypeptide comprising SEQ ID NO: 528. Preferably, said polypeptide fusion includes the polypeptide sequence of SEQ ID NO: 528 having 1, 2, 3, 4, or 5 point mutations that add, delete or substitute any of the amino acids of the polypeptide comprising SEQ ID NO: 528. More preferably, said polynucleotide fusion includes the polypeptide sequence of SEQ ID NO: 528 having 1, 2 or 3 point mutations that add, delete or substitute any of the amino acids of the polypeptide comprising SEQ ID NO: 528.

[0516] Preferably, the herein provided polypeptide fusion between WRN and NRG1 is oriented such that the part spanning the N-terminus to the fusion junction is polypeptide sequence from WRN and the part spanning the fusion junction to the C-terminus is NRG1 polypeptide sequence. Preferably, the NRG1 polypeptide sequence comprises or encodes an EGF-like domain. Said EGF-like domain containing WRN-NRG1 polypeptide fusion is preferably comprised by an aberrant cell as mentioned herein.

### ASPH-NRG1 Polypeptide Fusion

[0517] In accordance with the present disclosure, there is provided a polypeptide fusion encoded by a polynucleotide comprising a ASPH nucleic acid sequence (or a portion of a ASPH nucleic acid sequence) fused with an NRG1 nucleic acid sequence (or a portion of a NRG1 nucleic acid sequence). The ASPH nucleic acid sequence, or portion thereof, preferably encodes a sequence comprising or consisting of any one of SEQ ID NOs: 663-688, or an allelic variant of any one of these SEQ ID NOs. The NRG1 nucleic acid sequence, or portion thereof, preferably encodes a sequence comprising or consisting of any one of SEQ ID NOs 139-152, or an allelic variant of any one of these SEQ ID NOs.

[0518] The ASPH allelic variant of any one of SEQ ID NOs: 663-688, preferably has at least 85% sequence identity therewith, more preferably 90%, 92%, 94%, 96% or even more preferably at least 98% sequence identity therewith. The NRG1 allelic variant of any one of SEQ ID NOs: 139-152, preferably has at least 85% sequence identity therewith, more preferably 90%, 92%, 94%, 96% or even more preferably at least 98% sequence identity therewith.

[0519] Preferably, the portion of the ASPH nucleic acid sequence of said fusion encodes a polypeptide part of ASPH which comprises or consists of 8, 9, 10, 11, 12, 13 or 14 contiguous amino acids from any one of SEQ ID NOs: 663-688, or an allelic variant of any one of SEQ ID NOs: 663-688. Preferably, the portion of the NRG1 nucleic acid sequence of said fusion encodes a polypeptide part of NRG1 which comprises or consists 8, 9, 10, 11, 12, 13 or 14 contiguous amino acids from of any one of SEQ ID NOs: 139-152, or an allelic variant of any one of SEQ ID NOs: 139-152.

[0520] Preferably, any ASPH-NRG1 polypeptide fusion of the present disclosure includes a polypeptide sequence of any one of SEQ ID NOs: 663-688 having one or more (i.e. 1, 2, 3, 4, 5, 6, 7, 8, 9 or 10) point mutations that add, delete or substitute any of the amino acids of the polypeptides of SEQ ID NOs: 663-688. Preferably, said polypeptide fusion includes a polypeptide sequence of any one of SEQ ID NOs: 663-688 having 1, 2, 3, 4, or 5 point mutations that add, delete or substitute any of the amino acids of polypeptides of SEQ ID NOs: 663-688. More preferably, said polynucleotide fusion includes a polypeptide sequence of any one of SEQ ID NOs: 663-688 having 1, 2, or 3 point mutations that add, delete or substitute any of the amino acids of the polypeptides of SEQ ID NOs: 663-688.

[0521] In a preferred embodiment, there is provided a polypeptide fusion encoded by a polynucleotide which comprises a portion of exon 22 of ASPH, or an allelic variant thereof, and a portion of exon 2 of NRG1, or an allelic variant thereof. The polypeptide encoded by exon 22 of ASPH preferably comprises or consists of SEQ ID NO: 684, or an allelic variant of SEQ ID NO: 684. The polypeptide encoded by exon 2 of NRG1 preferably comprises or consists of SEQ ID NO: 140, or an allelic variant of SEQ ID NO: 140. Preferably, said polypeptide fusion further includes any one of SEQ ID NOs: 663-683, and any one of SEQ ID NOs: 141-151, or any allelic variant of SEQ ID NOs: 663-683 or SEQ ID NOs: 141-151. SEQ ID NOs: 663-683 correspond to the individual polypeptide sequences encoded by exons 1-21 of ASPH and SEQ ID NOs: 141-151 correspond to the individual polypeptide sequences encoded by exons 3-13 of NRG1, respectively. Said portion of exon 2 of NRG1 may also be according to SEQ ID NO: 154, or an allelic variant of SEQ ID NO: 154, which sequence corresponds to the polypeptide sequence encoded by all of exons 3-13.

[0522] Preferably, the polypeptide encoded by the portion of exon 22 of ASPH comprises or consists of 8, 9, 10, 11, 12, 13 or 14 contiguous amino acids from SEQ ID NO: 684, or from an allelic variant SEQ ID NO: 684. The allelic variant has at least 85% identity to SEQ ID NO: 684, preferably at least 90% identity, 92%, 94%, 96% or more preferably at least 98% sequence identity thereto. Also, the polypeptide encoded by the portion of exon 2 of NRG1 comprises or consists of 8, 9, 10, 11, 12, 13 or 14 contiguous amino acids from SEQ ID NO: 140, or from an allelic variant SEQ ID NO: 140. The allelic variant has at least 85% identity to SEQ ID NO: 140, preferably at least 90% identity, 92%, 94%, 96% or more preferably at least 98% sequence identity thereto.

[0523] Preferably, any ASPH-NRG1 polypeptide fusion of the present disclosure includes the polypeptide sequence according to SEQ ID NO: 636, or an allelic variant thereof. SEQ ID NO: 636 contains a fusion junction between ASPH and NRG1, which fusion is located between amino acid at position 24 (which, together with amino acids at positions 1-23, stems from ASPH) and the amino acid at position 26 (which, together with amino acids at positions 27-49 stems from NRG1). At position 25, an alanine (A, Ala) residue is present due to an unpredicted in frame fusion of NRG1 with ASPH. Preferably, the ASPH-NRG1 polypeptide fusion includes 8, 9, 10, 11, 12, 13 or 14 contiguous amino acids from SEQ ID NO: 636, or of an allelic variant thereof, including at least the amino acids at position 24, 25 and 26.

[0524] In a preferred embodiment, there is provided a polypeptide sequence according to SEQ ID NO: 636, or a polypeptide which comprises 8, 9, 10, 11, 12, 13, 14 or all contiguous amino acids from SEQ ID NO: 636, or of an allelic variant thereof, including at least the amino acids at position 24, 25 and 26. Said polypeptide sequence has at least 85% identity to SEQ ID NO: 636, preferably at least 90% identity, 92%, 94%, 96% or more preferably at least 98% sequence identity thereto.

[0525] Preferably, any ASPH-NRG1 polypeptide fusion of the present disclosure includes the polypeptide sequence of SEQ ID NO: 636 having one or more (i.e. 1, 2, 3, 4, 5, 6, 7, 8, 9 or 10) point mutations that add, delete or substitute any of the amino acids of the polypeptide comprising SEQ ID NO: 636. Preferably, said polypeptide fusion includes the polypeptide sequence of SEQ ID NO: 636 having 1, 2, 3, 4, or 5 point mutations that add, delete or substitute any of the amino acids of the polypeptide comprising SEQ ID NO: 636. More preferably, said polynucleotide fusion includes the polypeptide sequence of SEQ ID NO: 636 polypeptide having 1, 2 or 3 point mutations that add, delete or substitute any of the amino acids of the polypeptide comprising SEQ ID NO: 636.

[0526] Preferably, the herein provided polypeptide fusion between NRG1 and ASPH is oriented such that the part spanning the N-terminus to the fusion junction is polypeptide sequence from ASPH and the part spanning the fusion junction to the C-terminus is NRG1 polypeptide sequence. Preferably, the NRG1 polypeptide sequence comprises or encodes an EGF-like domain. Said EGF-like domain containing ASPH-NRG1 polypeptide fusion is preferably comprised by an aberrant cell as mentioned herein.

### NOTCH2-NRG1 Polypeptide Fusion

[0527] Also provided is a polypeptide fusion encoded by a polynucleotide which comprises a portion of exon 6 of NOTCH2, or an allelic variant thereof, and a portion of exon 6 of NRG1, or an allelic variant thereof. The polypeptide encoded by exon 6 of NOTCH2 preferably comprises or consists of SEQ ID NO: 709, or an allelic variant of SEQ ID NO: 709. The polypeptide encoded by exon 6 of NRG1 preferably comprises or consists of SEQ ID NO: 144, or an allelic variant of SEQ ID NO: 144. Preferably, said polypeptide fusion further includes any one of SEQ ID NOs: 704-708, or any allelic variant of SEQ ID NO: 704-708, and preferably further includes SEQ ID NOs: 145-151, or any allelic variant of SEQ ID NOs: 145-151. SEQ ID NOs: 566-596 correspond to the individual polypeptide sequences encoded by exons 1-5 of NOTCH2. SEQ ID NOs: 145-151 correspond to the individual polypeptide sequences encoded by exons 7-13 of NRG1, respectively. Said portion of exon 6 of NRG1 may also be comprised by SEQ ID NO: 156, or an allelic variant of SEQ ID NO: 156, which sequence corresponds to the polypeptide sequence encoded by all of exons 6-13.

[0528] Preferably, the polypeptide encoded by the portion of exon 6 of NOTCH2 comprises or consists of 8, 9, 10, 11, 12, 13 or 14 contiguous amino acids from SEQ ID NO: 709, or from an allelic variant SEQ ID NO: 709. The allelic variant has at least 85% identity to SEQ ID NO: 709, preferably at least 90% identity, 92%, 94%, 96% or more preferably at least 98% sequence identity thereto. Also, the polypeptide encoded by the portion of exon 6 of NRG1 comprises or consists of 8, 9, 10, 11, 12, 13 or 14 contiguous amino acids from SEQ ID NO: 144, or from an allelic variant SEQ ID NO: 144. The allelic variant has at least 85% identity to SEQ ID NO: 144, preferably at least 90% identity, 92%, 94%, 96% or more preferably at least 98% sequence identity thereto.

[0529] Preferably, any NOTCH2-NRG1 polypeptide fusion of the present disclosure includes the polypeptide sequence according to SEQ ID NO: 694, or an allelic variant thereof. SEQ ID NO: 694 contains a fusion junction between NOTCH2 and NRG1, which fusion is located between amino acid at position 24 (which, together with amino acids at positions 1-23, stems from NOTCH2) and the amino acid at position 26 (which, together with amino acids at positions 27-49 stems from NRG1). At position 25, an alanine (A, ala) residue is present due to an unpredicted in-frame fusion of NRG1 with NOTCH2. Preferably, the NOTCH2-NRG1 polypeptide fusion includes 8, 9, 10, 11, 12, 13 or 14 contiguous amino acids from SEQ ID NO: 694, or of an allelic variant thereof, including at least the amino acids at position 24, 25 and 26 thereof.

[0530] In a preferred embodiment, there is provided a polypeptide sequence according to SEQ ID NO: 694, or a polypeptide which comprises 8, 9, 10, 11, 12, 13, 14 or all contiguous amino acids from SEQ ID NO: 694, or of an allelic variant thereof, including at least the amino acids at position 24, 25 and 26. Said polypeptide sequence has at least 85% identity to SEQ ID NO: 694, preferably at least 90% identity, 92%, 94%, 96% or more preferably at least 98% sequence identity thereto.

[0531] Preferably, any NOTCH2-NRG1 polypeptide fusion of the present disclosure includes the polypeptide sequence of SEQ ID NO: 694 having one or more (i.e. 1, 2, 3, 4, 5, 6, 7, 8, 9 or 10) point mutations that add, delete or substitute any of the amino acids of the polypeptide comprising SEQ ID NO: 694. Preferably, said polypeptide fusion includes the polypeptide sequence of SEQ ID NO: 694 having 1, 2, 3, 4, or 5 point mutations that add, delete or substitute any of the amino acids of the polypeptide comprising SEQ ID NO: 694. More preferably, said polynucleotide fusion includes the polypeptide sequence of SEQ ID NO: 694 having 1, 2 or 3 point mutations that add, delete or substitute any of the amino acids of the polypeptide comprising SEQ ID NO: 694.

[0532] Preferably, the herein provided polypeptide fusion between NOTCH2 and NRG1 is oriented such that the part spanning the N-terminus to the fusion junction is polypeptide sequence from NOTCH2 and the part spanning the fusion junction to the C-terminus is NRG1 polypeptide sequence. Preferably, the NRG1 polypeptide sequence comprises or encodes an EGF-like domain. Said EGF-like domain containing NOTCH2-NRG1 polypeptide fusion is preferably comprised by an aberrant cell as mentioned herein.

### CD74-NRG1 Polypeptide Fusion

[0533] Also provided is a polypeptide fusion encoded by a polynucleotide which comprises a portion of exon 2 of CD74, or an allelic variant thereof, and a portion of exon 2 of NRG1, or an allelic variant thereof. The polypeptide encoded by exon 2 of CD74 preferably comprises or consists of SEQ ID NO: 730, or an allelic variant of SEQ ID NO: 730. The polypeptide encoded by exon 2 of NRG1 preferably comprises or consists of SEQ ID NO: 140, or an allelic variant of SEQ ID NO: 140. Preferably, said polypeptide fusion further includes any one of SEQ ID NO: 729 or SEQ ID NOs: 141-151, or any allelic variant of SEQ ID NO: 729 or SEQ ID NOs: 141-151. SEQ ID NO: 729 corresponds to the polypeptide sequence encoded by exon 1 of CD74. SEQ ID NOs: 141-151 correspond to the individual polypeptide sequences encoded by exons 3-13 of NRG1, respectively. Said portion of exon 2 of NRG1 may also be comprised by SEQ ID NO: 154, or an allelic variant of SEQ ID NO: 154, which sequence corresponds to the polypeptide sequence encoded by all of exons 2-13.

[0534] Preferably, the polypeptide encoded by the portion of exon 2 of CD74 comprises or consists of 8, 9, 10, 11, 12, 13 or 14 contiguous amino acids from SEQ ID NO: 730, or from an allelic variant SEQ ID NO: 730. The allelic variant has at least 85% identity to SEQ ID NO: 730, preferably at least 90% identity, 92%, 94%, 96% or more preferably at least 98% sequence identity thereto. Also, the polypeptide encoded by the portion of exon 2 of NRG1 comprises or consists of 8, 9, 10, 11, 12, 13 or 14 contiguous amino acids from SEQ ID NO: 140, or from an allelic variant SEQ ID NO: 140. The allelic variant has at least 85% identity to SEQ ID NO: 140, preferably at least 90% identity, 92%, 94%, 96% or more preferably at least 98% sequence identity thereto.

[0535] Preferably, any CD74-NRG1 polypeptide fusion of the present disclosure includes the polypeptide sequence according to SEQ ID NO: 718, or an allelic variant thereof. SEQ ID NO: 718 contains a fusion junction between CD74 and NRG1, which fusion is located between amino acid at position 24 (which, together with amino acids at positions 1-23, stems from CD74) and the amino acid at position 26 (which, together with amino acids at positions 27-49 stems from NRG1). At position 25, a proline (P, pro) residue is present due to an unpredicted in frame fusion of NRG1 with CD74. Preferably, the CD74-NRG1 polypeptide fusion includes 8, 9, 10, 11, 12, 13 or 14 contiguous amino acids from SEQ ID NO: 718, or of an allelic variant thereof, including at least the amino acids at position 24, 25 and 26 thereof.

[0536] In a preferred embodiment, there is provided a polypeptide sequence according to SEQ ID NO: 718, or a polypeptide which comprises 8, 9, 10, 11, 12, 13, 14 or all contiguous amino acids from SEQ ID NO: 718, or of an allelic variant thereof, including at least the amino acids at position 24, 25 and 26. Said polypeptide sequence has at least 85% identity to SEQ ID NO: 718, preferably at least 90% identity, 92%, 94%, 96% or more preferably at least 98% sequence identity thereto.

[0537] Preferably, any CD74-NRG1 polypeptide fusion of the present disclosure includes the polypeptide sequence of SEQ ID NO: 718 having one or more (i.e. 1, 2, 3, 4, 5, 6, 7, 8, 9 or 10) point mutations that add, delete or substitute any of the amino acids of the polypeptide comprising SEQ ID NO: 718. Preferably, said polypeptide fusion includes the polypeptide sequence of SEQ ID NO: 718 having 1, 2, 3, 4, or 5 point mutations that add, delete or substitute any of the amino acids of the polypeptide comprising SEQ ID NO: 718. More preferably, said polynucleotide fusion includes the polypeptide sequence of SEQ ID NO: 718 having 1, 2 or 3 point mutations that add, delete or substitute any of the amino acids of the polypeptide comprising SEQ ID NO: 718.

[0538] Preferably, the herein provided polypeptide fusion between CD74 and NRG1 is oriented such that the part spanning the N-terminus to the fusion junction is polypeptide sequence from CD74 and the part spanning the fusion junction to the C-terminus is NRG1 polypeptide sequence. Preferably, the NRG1 polypeptide sequence comprises or encodes an EGF-like domain. Said EGF-like domain containing CD74-NRG1 polypeptide fusion is preferably comprised by an aberrant cell as mentioned herein.

### SDC4-NRG1 Polypeptide Fusion

[0539] Also provided is a polypeptide fusion encoded by a polynucleotide which comprises a portion of exon 2 of SDC4, or an allelic variant thereof, and a portion of exon 2 of NRG1, or an allelic variant thereof. The polypeptide encoded by exon 2 of SDC4 preferably comprises or consists of SEQ ID NO: 752, or an allelic variant of SEQ ID NO: 752. The polypeptide encoded by exon 2 of NRG1 preferably comprises or consists of SEQ ID NO: 140, or an allelic variant of SEQ ID NO: 140. Preferably, said polypeptide fusion further includes any one of SEQ ID NO: 751 or SEQ ID NOs: 141-151, or any allelic variant of SEQ ID NO: 751 or SEQ ID NOs: 141-151. SEQ ID NO: 751 corresponds to the polypeptide sequence encoded by exon 1 of SDC4. SEQ ID NOs: 141-151 correspond to the individual polypeptide sequences encoded by exons 3-13 of NRG1, respectively. Said portion of exon 2 of NRG1 may also be comprised by SEQ ID NO: 154, or an allelic variant of SEQ ID NO: 154, which sequence corresponds to the polypeptide sequence encoded by all of exons 2-13.

[0540] Preferably, the polypeptide encoded by the portion of exon 2 of SDC4 comprises or consists of 8, 9, 10, 11, 12, 13 or 14 contiguous amino acids from SEQ ID NO: 752, or from an allelic variant SEQ ID NO: 752. The allelic variant has at least 85% identity to SEQ ID NO: 752, preferably at least 90% identity, 92%, 94%, 96% or more preferably at least 98% sequence identity thereto. Also, the polypeptide encoded by the portion of exon 2 of NRG1 comprises or consists of 8, 9, 10, 11, 12, 13 or 14 contiguous amino acids from SEQ ID NO: 140, or from an allelic variant SEQ ID NO: 140. The allelic variant has at least 85% identity to SEQ ID NO: 140, preferably at least 90% identity, 92%, 94%, 96% or more preferably at least 98% sequence identity thereto.

[0541] Preferably, any SDC4-NRG1 polypeptide fusion of the present disclosure includes the polypeptide sequence according to SEQ ID NO: 744, or an allelic variant thereof. SEQ ID NO: 744 contains a fusion junction between SDC4 and NRG1, which fusion is located between amino acid at position 24 (which, together with amino acids at positions 1-23, stems from SDC4) and the amino acid at position 26 (which, together with amino acids at positions 27-49 stems from NRG1). At position 25, an alanine (A, ala) residue is present due to an unpredicted in-frame fusion of NRG1 with SDC4. Preferably, the SDC4-NRG1 polypeptide fusion includes 8, 9, 10, 11, 12, 13 or 14 contiguous amino acids from SEQ ID NO: 744, or of an allelic variant thereof, including at least the amino acids at position 24, 25 and 26 thereof.

[0542] In a preferred embodiment, there is provided a polypeptide sequence according to SEQ ID NO: 744, or a polypeptide which comprises 8, 9, 10, 11, 12, 13, 14 or all contiguous amino acids from SEQ ID NO: 744, or of an allelic variant thereof, including at least the amino acids at position 24, 25 and 26. Said polypeptide sequence has at least 85% identity to SEQ ID NO: 744, preferably at least 90% identity, 92%, 94%, 96% or more preferably at least 98% sequence identity thereto.

[0543] Preferably, any SDC4-NRG1 polypeptide fusion of the present disclosure includes the polypeptide sequence of SEQ ID NO: 744 having one or more (i.e. 1, 2, 3, 4, 5, 6, 7, 8, 9 or 10) point mutations that add, delete or substitute any of the amino acids of the polypeptide comprising SEQ ID NO: 744. Preferably, said polypeptide fusion includes the polypeptide sequence of SEQ ID NO: 744 having 1, 2, 3, 4, or 5 point mutations that add, delete or substitute any of the amino acids of the polypeptide comprising SEQ ID NO: 744. More preferably, said polynucleotide fusion includes the polypeptide sequence of SEQ ID NO: 744 having 1, 2 or 3 point mutations that add, delete or substitute any of the amino acids of the polypeptide comprising SEQ ID NO: 744.

[0544] Preferably, the herein provided polypeptide fusion between SDC4 and NRG1 is oriented such that the part spanning the N-terminus to the fusion junction is polypeptide sequence from SDC4 and the part spanning the fusion junction to the C-terminus is NRG1 polypeptide sequence. Preferably, the NRG1 polypeptide sequence comprises or encodes an EGF-like domain. Said EGF-like domain containing SDC4-NRG1 polypeptide fusion is preferably comprised by an aberrant cell as mentioned herein.

[0545] Also provided is a polypeptide fusion encoded by a polynucleotide which comprises a portion of exon 4 of SDC4, or an allelic variant thereof, and a portion of exon 2 of NRG1, or an allelic variant thereof. The polypeptide encoded by exon 4 of SDC4 preferably comprises or consists of SEQ ID NO: 754, or an allelic variant of SEQ ID NO: 754. The polypeptide encoded by exon 2 of NRG1 preferably comprises or consists of SEQ ID NO: 140, or an allelic variant of SEQ ID NO: 140. Preferably, said polypeptide fusion further includes any one of SEQ IDs NO: 751-753 or SEQ ID NOs: 141-151, or any allelic variant of SEQ ID NO: 751-753 or SEQ ID NOs: 141-151. SEQ ID NO: 751-753 correspond to the individual polypeptide sequences encoded by exon 1-3 of SDC4. SEQ ID NOs: 141-151 correspond to the individual polypeptide sequences encoded by exons 3-13 of NRG1, respectively. Said portion of exon 2 of NRG1 may also be comprised by SEQ ID NO: 154, or an allelic variant of SEQ ID NO: 154, which sequence corresponds to the polypeptide sequence encoded by all of exons 2-13.

[0546] Preferably, the polypeptide encoded by the portion of exon 4 of SDC4 comprises or consists of 8, 9, 10, 11, 12, 13 or 14 contiguous amino acids from SEQ ID NO: 754, or from an allelic variant SEQ ID NO: 754. The allelic variant has at least 85% identity to SEQ ID NO: 754, preferably at least 90% identity, 92%, 94%, 96% or more preferably at least 98% sequence identity thereto. Also, the polypeptide encoded by the portion of exon 2 of NRG1 comprises or consists of 8, 9, 10, 11, 12, 13 or 14 contiguous amino acids from SEQ ID NO: 140, or from an allelic variant SEQ ID NO: 140. The allelic variant has at least 85% identity to SEQ ID NO: 140, preferably at least 90% identity, 92%, 94%, 96% or more preferably at least 98% sequence identity thereto.

[0547] Preferably, any SDC4-NRG1 polypeptide fusion of the present disclosure includes the polypeptide sequence according to SEQ ID NO: 825, or an allelic variant thereof. SEQ ID NO: 825 contains a fusion junction between SDC4 and NRG1, which fusion is located between amino acid at position 24 (which, together with amino acids at positions 1-23, stems from SDC4) and the amino acid at position 26 (which, together with amino acids at positions 27-49 stems from NRG1). At position 25, an alanine (A, ala) residue is present due to an unpredicted in-frame fusion of NRG1 with SDC4. Preferably, the SDC4-NRG1 polypeptide fusion includes 8, 9, 10, 11, 12, 13 or 14 contiguous amino acids from SEQ ID NO: 825, or of an allelic variant thereof, including at least the amino acids at position 24, 25 and 26 thereof.

[0548] In a preferred embodiment, there is provided a polypeptide sequence according to SEQ ID NO: 825, or a polypeptide which comprises 8, 9, 10, 11, 12, 13, 14 or all contiguous amino acids from SEQ ID NO: 825, or of an allelic variant thereof, including at least the amino acids at position 24, 25 and 26. Said polypeptide sequence has at least 85% identity to SEQ ID NO: 825, preferably at least 90% identity, 92%, 94%, 96% or more preferably at least 98% sequence identity thereto.

[0549] Preferably, any SDC4-NRG1 polypeptide fusion of the present disclosure includes the polypeptide sequence of SEQ ID NO: 825 having one or more (i.e. 1, 2, 3, 4, 5, 6, 7, 8, 9 or 10) point mutations that add, delete or substitute any of the amino acids of the polypeptide comprising SEQ ID NO: 825. Preferably, said polypeptide fusion includes the polypeptide sequence of SEQ ID NO: 825 having 1, 2, 3, 4, or 5 point mutations that add, delete or substitute any of the amino acids of the polypeptide comprising SEQ ID NO: 825. More preferably, said polynucleotide fusion includes the polypeptide sequence of SEQ ID NO: 825 having 1, 2 or 3 point mutations that add, delete or substitute any of the amino acids of the polypeptide comprising SEQ ID NO: 825.

[0550] Preferably, the herein provided polypeptide fusion between SDC4 and NRG1 is oriented such that the part spanning the N-terminus to the fusion junction is polypeptide sequence from SDC4 and the part spanning the fusion junction to the C-terminus is NRG1 polypeptide sequence. Preferably, the NRG1 polypeptide sequence comprises or encodes an EGF-like domain. Said EGF-like domain containing SDC4-NRG1 polypeptide fusion is preferably comprised by an aberrant cell as mentioned herein.

### SLC4A4-NRG1 Polypeptide Fusion

[0551] Also provided is a polypeptide fusion encoded by a polynucleotide which comprises a portion of exon 14 of SLC4A4, or an allelic variant thereof, and a portion of exon 6 of NRG1, or an allelic variant thereof. The polypeptide encoded by exon 14 of SLC4A4 preferably comprises or consists of SEQ ID NO: 806, or an allelic variant of SEQ ID NO: 806. The polypeptide encoded by exon 6 of NRG1 preferably comprises or consists of SEQ ID NO: 144, or an allelic variant of SEQ ID NO: 144. Preferably, said polypeptide fusion further includes any one of SEQ ID NOs: 794-805, or any allelic variant of SEQ ID NO: 794-805, and preferably further includes SEQ ID NOs: 145-151, or any allelic variant of SEQ ID NOs: 145-151. SEQ ID NOs: 794-805 correspond to the individual polypeptide sequences encoded by exons 2-13 of SLC4A4. SEQ ID NOs: 145-151 correspond to the individual polypeptide sequences encoded by exons 7-13 of NRG1, respectively. Said portion of exon 6 of NRG1 may also be comprised by SEQ ID NO: 156, or an allelic variant of SEQ ID NO: 156, which sequence corresponds to the polypeptide sequence encoded by all of exons 6-13.

[0552] Preferably, the polypeptide encoded by the portion of exon 14 of SLC4A4 comprises or consists of 8, 9, 10, 11, 12, 13 or 14 contiguous amino acids from SEQ ID NO: 806, or from an allelic variant SEQ ID NO: 806. The allelic variant has at least 85% identity to SEQ ID NO: 806, preferably at least 90% identity, 92%, 94%, 96% or more preferably at least 98% sequence identity thereto. Also, the polypeptide encoded by the portion of exon 6 of NRG1 comprises or consists of 8, 9, 10, 11, 12, 13 or 14 contiguous amino acids from SEQ ID NO: 144, or from an allelic variant SEQ ID NO: 144. The allelic variant has at least 85% identity to SEQ ID NO: 144, preferably at least 90% identity, 92%, 94%, 96% or more preferably at least 98% sequence identity thereto.

[0553] Preferably, any SLC4A4-NRG1 polypeptide fusion of the present disclosure includes the polypeptide sequence according to SEQ ID NO: 766, or an allelic variant thereof. SEQ ID NO: 766 contains a fusion junction between SLC4A4 and NRG1, which fusion is located between amino acid at position 24 (which, together with amino acids at positions 1-23, stems from SLC4A4) and the amino acid at position 26 (which, together with amino acids at positions 27-49 stems from NRG1). At position 25, an alanine (A, ala) residue is present due to an unpredicted in-frame fusion of NRG1 with SLC4A4. Preferably, the SLC4A4-NRG1 polypeptide fusion includes 8, 9, 10, 11, 12, 13 or 14 contiguous amino acids from SEQ ID NO: 766, or of an allelic variant thereof, including at least the amino acids at position 24, 25 and 26 thereof.

[0554] In a preferred embodiment, there is provided a polypeptide sequence according to SEQ ID NO: 766, or a polypeptide which comprises 8, 9, 10, 11, 12, 13, 14 or all contiguous amino acids from SEQ ID NO: 766, or of an allelic variant thereof, including at least the amino acids at position 24, 25 and 26. Said polypeptide sequence has at least 85% identity to SEQ ID NO: 766, preferably at least 90% identity, 92%, 94%, 96% or more preferably at least 98% sequence identity thereto.

[0555] Preferably, any SLC4A4-NRG1 polypeptide fusion of the present disclosure includes the polypeptide sequence of SEQ ID NO: 766 having one or more (i.e. 1, 2, 3, 4, 5, 6, 7, 8, 9 or 10) point mutations that add, delete or substitute any of the amino acids of the polypeptide comprising SEQ ID NO: 766. Preferably, said polypeptide fusion includes the polypeptide sequence of SEQ ID NO: 766 having 1, 2, 3, 4, or 5 point mutations that add, delete or substitute any of the amino acids of the polypeptide comprising SEQ ID NO: 766. More preferably, said polynucleotide fusion includes the polypeptide sequence of SEQ ID NO: 766 having 1, 2 or 3 point mutations that add, delete or substitute any of the amino acids of the polypeptide comprising SEQ ID NO: 766.

[0556] Preferably, the herein provided polypeptide fusion between SLC4A4 and NRG1 is oriented such that the part spanning the N-terminus to the fusion junction is polypeptide sequence from SLC4A4 and the part spanning the fusion junction to the C-terminus is NRG1 polypeptide sequence. Preferably, the NRG1 polypeptide sequence comprises or encodes an EGF-like domain. Said EGF-like domain containing SLC4A4-NRG1 polypeptide fusion is preferably comprised by an aberrant cell as mentioned herein.

### ZFAT-NRG1 Polypeptide Fusion

[0557] In accordance with the present disclosure, there is provided a polypeptide fusion encoded by a polynucleotide comprising a ZFAT nucleic acid sequence (or a portion of a ZFAT nucleic acid sequence) fused with an NRG1 nucleic acid sequence (or a portion of a NRG1 nucleic acid sequence). The ZFAT nucleic acid sequence, or portion thereof, preferably encodes a sequence comprising or consisting of any one of SEQ ID NOs: 847-863, or an allelic variant of any one of these SEQ ID NOs. The NRG1 nucleic acid sequence, or portion thereof, preferably encodes a sequence comprising or consisting of any one of SEQ ID NOs: 139-152, or an allelic variant of any one of these SEQ ID NOs.

[0558] The ZFAT allelic variant of any one of SEQ ID NOs: 847-863, preferably has at least 85% sequence identity therewith, more preferably 90%, 92%, 94%, 96% or even more preferably at least 98% sequence identity therewith. The NRG1 allelic variant of any one of SEQ ID NOs: 139-152, preferably has at least 85% sequence identity therewith, more preferably 90%, 92%, 94%, 96% or even more preferably at least 98% sequence identity therewith.

[0559] Preferably, the portion of the ZFAT nucleic acid sequence of said fusion encodes a polypeptide part of ZFAT which comprises or consists of 8, 9, 10, 11, 12, 13 or 14 contiguous amino acids from any one of SEQ ID NOs: 847-863, or an allelic variant of any one of SEQ ID NOs: 847-863. Preferably, the portion of the NRG1 nucleic acid sequence of said fusion encodes a polypeptide part of NRG1 which comprises or consists 8, 9, 10, 11, 12, 13 or 14 contiguous amino acids from of any one of SEQ ID NOs: 139-152, or an allelic variant of any one of SEQ ID NOs: 139-152.

[0560] Preferably, any ZFAT-NRG1 polypeptide fusion of the present disclosure includes a polypeptide sequence of any one of SEQ ID NOs: 847-863 having one or more (i.e. 1, 2, 3, 4, 5, 6, 7, 8, 9 or 10) point mutations that add, delete or substitute any of the amino acids of the polypeptides of SEQ ID NOs: 847-863. Preferably, said polypeptide fusion includes a polypeptide sequence of any one of SEQ ID NOs: 847-863 having 1, 2, 3, 4, or 5 point mutations that add, delete or substitute any of the amino acids of polypeptides of SEQ ID NOs: 847-863. More preferably, said polynucleotide fusion includes a polypeptide sequence of any one of SEQ ID NOs: 847-863 having 1, 2, or 3 point mutations that add, delete or substitute any of the amino acids of the polypeptides of SEQ ID NOs: 847-863.

[0561] In a preferred embodiment, there is provided a polypeptide fusion encoded by a polynucleotide which comprises a portion of exon 12 of ZFAT, or an allelic variant thereof, and a portion of exon 6 of NRG1, or an allelic variant thereof. The polypeptide encoded by exon 12 of ZFAT preferably comprises or consists of SEQ ID NO: 858, or an allelic variant of SEQ ID NO: 858. The polypeptide encoded by exon 6 of NRG1 preferably comprises or consists of SEQ ID NO: 144, or an allelic variant of SEQ ID NO: 144. Preferably, said polypeptide fusion further includes any one of SEQ ID NOs: 847-857, and any one of SEQ ID NOs: 145-151, or any allelic variant of SEQ ID NOs: 847-857 or SEQ ID NOs: 145-151. SEQ ID NOs: 847-857 correspond to the individual polypeptide sequences encoded by exons 1-11 of ZFAT and SEQ ID NOs: 145-151 correspond to the individual polypeptide sequences encoded by exons 7-13 of NRG1, respectively. Said portion of exon 6 of NRG1 may also be according to SEQ ID NO: 156, or an allelic variant of SEQ ID NO: 156, which sequence corresponds to the polypeptide sequence encoded by all of exons 6-13.

[0562] Preferably, the polypeptide encoded by the portion of exon 12 of ZFAT comprises or consists of 8, 9, 10, 11, 12, 13 or 14 contiguous amino acids from SEQ ID NO: 858, or from an allelic variant SEQ ID NO: 858. The allelic variant has at least 85% identity to SEQ ID NO: 858, preferably at least 90% identity, 92%, 94%, 96% or more preferably at least 98% sequence identity thereto. Also, the polypeptide encoded by the portion of exon 6 of NRG1 comprises or consists of 8, 9, 10, 11, 12, 13 or 14 contiguous amino acids from SEQ ID NO: 144, or from an allelic variant SEQ ID NO: 144. The allelic variant has at least 85% identity to SEQ ID NO: 144, preferably at least 90% identity, 92%, 94%, 96% or more preferably at least 98% sequence identity thereto.

[0563] Preferably, any ZFAT-NRG1 polypeptide fusion of the present disclosure includes the polypeptide sequence according to SEQ ID NO: 829, or an allelic variant thereof. SEQ ID NO: 829 contains a fusion junction between ZFAT and NRG1, which fusion is located between amino acid at position 24 (which, together with amino acids at positions 1-23, stems from ZFAT) and the amino acid at position 26 (which, together with amino acids at positions 27-49 stems from NRG1). At position 25, an alanine (A, Ala) residue is present due to an unpredicted in-frame fusion of NRG1 with ZFAT. Preferably, the ZFAT-NRG1 polypeptide fusion includes 8, 9, 10, 11, 12, 13 or 14 contiguous amino acids from SEQ ID NO: 829, or of an allelic variant thereof, including at least the amino acids at position 24, 25 and 26.

[0564] In a preferred embodiment, there is provided a polypeptide sequence according to SEQ ID NO: 829, or a polypeptide which comprises 8, 9, 10, 11, 12, 13, 14 or all contiguous amino acids from SEQ ID NO: 829, or of an allelic variant thereof, including at least the amino acids at position 24, 25 and 26. Said polypeptide sequence has at least 85% identity to SEQ ID NO: 829, preferably at least 90% identity, 92%, 94%, 96% or more preferably at least 98% sequence identity thereto.

[0565] Preferably, any ZFAT-NRG1 polypeptide fusion of the present disclosure includes the polypeptide sequence of SEQ ID NO: 829 having one or more (i.e. 1, 2, 3, 4, 5, 6, 7, 8, 9 or 10) point mutations that add, delete or substitute any of the amino acids of the polypeptide comprising SEQ ID NO: 829. Preferably, said polypeptide fusion includes the polypeptide sequence of SEQ ID NO: 829 having 1, 2, 3, 4, or 5 point mutations that add, delete or substitute any of the amino acids of the polypeptide comprising SEQ ID NO: 829. More preferably, said polynucleotide fusion includes the polypeptide sequence of SEQ ID NO: 829 polypeptide having 1, 2 or 3 point mutations that add, delete or substitute any of the amino acids of the polypeptide comprising SEQ ID NO: 829.

[0566] Preferably, the herein provided polypeptide fusion between NRG1 and ZFAT is oriented such that the part spanning the N-terminus to the fusion junction is polypeptide sequence from ZFAT and the part spanning the fusion junction to the C-terminus is NRG1 polypeptide sequence. Preferably, the NRG1 polypeptide sequence comprises or encodes an EGF-like domain. Said EGF-like domain containing ZFAT-NRG1 polypeptide fusion is preferably comprised by an aberrant cell as mentioned herein.

### DSCAML1-NRG1 Polypeptide Fusion

[0567] In accordance with the present disclosure, there is provided a polypeptide fusion encoded by a polynucleotide comprising a DSCAML1 nucleic acid sequence (or a portion of a DSCAML1 nucleic acid sequence) fused with an NRG1 nucleic acid sequence (or a portion of a NRG1 nucleic acid sequence). The DSCAML1 nucleic acid sequence, or portion thereof, preferably encodes a sequence comprising or consisting of any one of SEQ ID NOs: 904-937, or an allelic variant of any one of these SEQ ID NOs. The NRG1 nucleic acid sequence, or portion thereof, preferably encodes a sequence comprising or consisting of any one of SEQ ID NOs 139-152, or an allelic variant of any one of these SEQ ID NOs.

[0568] The DSCAML1 allelic variant of any one of SEQ ID NOs: 904-937, preferably has at least 85% sequence identity therewith, more preferably 90%, 92%, 94%, 96% or even more preferably at least 98% sequence identity therewith. The NRG1 allelic variant of any one of SEQ ID NOs: 139-152, preferably has at least 85% sequence identity therewith, more preferably 90%, 92%, 94%, 96% or even more preferably at least 98% sequence identity therewith.

[0569] Preferably, the portion of the DSCAML1 nucleic acid sequence of said fusion encodes a polypeptide part of DSCAML1 which comprises or consists of 8, 9, 10, 11, 12, 13 or 14 contiguous amino acids from any one of SEQ ID NOs: 904-937, or an allelic variant of any one of SEQ ID NOs: 904-937. Preferably, the portion of the NRG1 nucleic acid sequence of said fusion encodes a polypeptide part of NRG1 which comprises or consists 8, 9, 10, 11, 12, 13 or 14 contiguous amino acids from of any one of SEQ ID NOs: 139-152, or an allelic variant of any one of SEQ ID NOs: 139-152.

[0570] Preferably, any DSCAML1-NRG1 polypeptide fusion of the present disclosure includes a polypeptide sequence of any one of SEQ ID NOs: 904-937 having one or more (i.e. 1, 2, 3, 4, 5, 6, 7, 8, 9 or 10) point mutations that add, delete or substitute any of the amino acids of the polypeptides of SEQ ID NOs: 904-937. Preferably, said polypeptide fusion includes a polypeptide sequence of any one of SEQ ID NOs: 904-937 having 1, 2, 3, 4, or 5 point mutations that add, delete or substitute any of the amino acids of polypeptides of SEQ ID NOs: 904-937. More preferably, said polynucleotide fusion includes a polypeptide sequence of any one of SEQ ID NOs: 904-937 having 1, 2, or 3 point mutations that add, delete or substitute any of the amino acids of the polypeptides of SEQ ID NOs: 904-937.

[0571] In a preferred embodiment, there is provided a polypeptide fusion encoded by a polynucleotide which comprises a portion of exon 3 of DSCAML1, or an allelic variant thereof, and a portion of exon 2 of NRG1, or an allelic variant thereof. The polypeptide encoded by exon 3 of DSCAML1 preferably comprises or consists of SEQ ID NO: 906, or an allelic variant of SEQ ID NO: 906. The polypeptide encoded by exon 2 of NRG1 preferably comprises or consists of SEQ ID NO: 140, or an allelic variant of SEQ ID NO: 140. Preferably, said polypeptide fusion further includes any one of SEQ ID NOs: 904-905, and any one of SEQ ID NOs: 141-151, or any allelic variant of SEQ ID NOs: 904-905 or SEQ ID NOs: 141-151. SEQ ID NOs: 904-905 correspond to the individual polypeptide sequences encoded by exons 1-2 of DSCAML1 and SEQ ID NOs: 141-151 correspond to the individual polypeptide sequences encoded by exons 3-13 of NRG1, respectively. Said portion of exon 2 of NRG1 may also be according to SEQ ID NO: 154, or an allelic variant of SEQ ID NO: 154, which sequence corresponds to the polypeptide sequence encoded by all of exons 2-13.

[0572] Preferably, the polypeptide encoded by the portion of exon 3 of DSCAML1 comprises or consists of 8, 9, 10, 11, 12, 13 or 14 contiguous amino acids from SEQ ID NO: 906, or from an allelic variant SEQ ID NO: 906. The allelic variant has at least 85% identity to SEQ ID NO: 906, preferably at least 90% identity, 92%, 94%, 96% or more preferably at least 98% sequence identity thereto. Also, the polypeptide encoded by the portion of exon 2 of NRG1 comprises or consists of 8, 9, 10, 11, 12, 13 or 14 contiguous amino acids from SEQ ID NO: 140, or from an allelic variant SEQ ID NO: 140. The allelic variant has at least 85% identity to SEQ ID NO: 140, preferably at least 90% identity, 92%, 94%, 96% or more preferably at least 98% sequence identity thereto.

[0573] Preferably, any DSCAML1-NRG1 polypeptide fusion of the present disclosure includes the polypeptide sequence according to SEQ ID NO: 869, or an allelic variant thereof. SEQ ID NO: 869 contains a fusion junction between DSCAML1 and NRG1, which fusion is located between amino acid at position 24 (which, together with amino acids at positions 1-23, stems from DSCAML1) and the amino acid at position 26 (which, together with amino acids at positions 27-49 stems from NRG1). At position 25, an alanine (A, Ala) residue is present due to an unpredicted in-frame fusion of NRG1 with DSCAML1. Preferably, the DSCAML1-NRG1 polypeptide fusion includes 8, 9, 10, 11, 12, 13 or 14 contiguous amino acids from SEQ ID NO: 869, or of an allelic variant thereof, including at least the amino acids at position 24, 25 and 26.

[0574] In a preferred embodiment, there is provided a polypeptide sequence according to SEQ ID NO: 869, or a polypeptide which comprises 8, 9, 10, 11, 12, 13, 14 or all contiguous amino acids from SEQ ID NO: 869, or of an allelic variant thereof, including at least the amino acids at position 24, 25 and 26. Said polypeptide sequence has at least 85% identity to SEQ ID NO: 869, preferably at least 90% identity, 92%, 94%, 96% or more preferably at least 98% sequence identity thereto.

[0575] Preferably, any DSCAML1-NRG1 polypeptide fusion of the present disclosure includes the polypeptide sequence of SEQ ID NO: 869 having one or more (i.e. 1, 2, 3, 4, 5, 6, 7, 8, 9 or 10) point mutations that add, delete or substitute any of the amino acids of the polypeptide comprising SEQ ID NO: 869. Preferably, said polypeptide fusion includes the polypeptide sequence of SEQ ID NO: 869 having 1, 2, 3, 4, or 5 point mutations that add, delete or substitute any of the amino acids of the polypeptide comprising SEQ ID NO: 869. More preferably, said polynucleotide fusion includes the polypeptide sequence of SEQ ID NO: 869 polypeptide having 1, 2 or 3 point mutations that add, delete or substitute any of the amino acids of the polypeptide comprising SEQ ID NO: 869.

[0576] Preferably, the herein provided polypeptide fusion between NRG1 and DSCAML1 is oriented such that the part spanning the N-terminus to the fusion junction is polypeptide sequence from DSCAML1 and the part spanning the fusion junction to the C-terminus is NRG1 polypeptide sequence. Preferably, the NRG1 polypeptide sequence comprises or encodes an EGF-like domain. Said EGF-like domain containing DSCAML1-NRG1 polypeptide fusion is preferably comprised by an aberrant cell as mentioned herein.

[0577] Each of the herein mentioned polypeptide fusions comprising NRG1, including VAPB-NRG1, CADM1-NRG1, CD44-NRG1, SLC3A2-NRG1, VTCN1-NRG1, CDH1-NRG1, CXADR-NRG1, GTF2E2-NRG1, CSMD1-NRG1, PTN-NRG1, ST14-NRG1, THBS1-NRG1, AGRN-NRG1, PVALB-NRG1, APP-NRG1, WRN-NRG1, DAAM1-NRG1, ASPH-NRG1, NOTCH2-NRG1, CD74-NRG1, SDC4-NRG1, SLC4A4-NRG1, ZFAT-NRG1 and DSCAML1-NRG1 is preferably isolated. Any method of the invention preferably comprises isolating one or more polypeptide-containing components from a sample. The one or more polypeptide-containing components are typically isolated from any cells or cellular material in the sample.

### Assays for Detecting or Identifying NRG1 Fusions

[0578] Typically, any polynucleotide or polypeptide fusion to be detected is obtained or derived from an aberrant cell expressing a polynucleotide fusion that comprises an EGF-like domain of NRG1. A detection assay may not be directed at identifying the presence of an EGF-like domain as it may suffice to merely detect the actual fusion junction which is indicative for the presence of a polynucleotide or polypeptide that further contains an EGF-like domain of NRG1. The presence of an EGF-like domain can be inferred from specifically detecting or identifying an in frame polynucleotide fusion between NRG1 and any fusion partner as such fusion junction is found to be 5′ to the EGF-like domain of NRG1.

[0579] Various techniques are available for the skilled person to detect known polynucleotide or polypeptide fusions in samples obtained from human subjects, each of which typically includes a binding agent that specifically binds to a target of interest. Such a binding agent refers to an agent, such as a primer, a primer pair, a probe or an antibody, that allows selective binding to a target sequence with the aim of specifically detecting the target. Binding includes hybridizing or annealing to polynucleotide sequences, typically to amplify and/or detect the target, or to binding of an epitope by an antibody with high affinity and specificity to allow detection of the target.

[0580] Technologies based on the use of a primer, a primer pair or a probe that specifically binds to a polynucleotide fusion are well known in the art. Likewise, technologies wherein polypeptides are detected on the basis of binding agents are well known in the art, in particular antibodies that specifically bind a polypeptide are available.

[0581] Other ways to use primer, primer pair or probes of the present disclosure include next generation sequencing (NGS), or use of panels comprising multiplex assays to detect fusions (e.g. Archer FusionPlex™ Custom Solid Panel that utilizes the Anchored Multiplex PCR (AMP™) technology targeting known exons), or digital droplet PCR (ddPCR™) for instance using the QX200™ AutoDG™ Droplet Digital PCR System (by BioRad). Other means include the use of molecular beacons or quantitative PCR (Q-PCR) using a TaqMan™ probe or an intercalating fluorescent dye, such as SYBR™ Green, fluorescence in situ hybridization (FISH), next generation sequencing (NGS), ddPCR™, Anchored Multiplex PCR, semi-quantitative PCR or quantitative PCR.

[0582] Still other methods to detect a polynucleotide fusion of NRG1 with a fusion partner as mentioned herein using a probe of the present disclosure, is by IHC or FISH, such as break apart FISH wherein two ends of the gene of interest are labeled with different colors. To detect an NRG1 comprising fusion as mentioned herein, preferably the forward strand of hg38 chr8:31,639,222-32,764,405 is used to design suitable probes to label two ends of the NRG1 gene to allow detection of any fusion.

[0583] The present disclosure provides a nucleic acid probe, primer or primer pair for detection of any polynucleotide fusion as mentioned herein. Also provided is a detection assay comprising said nucleic acid probe, primer or primer pair for detection of the presence of any polynucleotide fusion as mentioned herein. Such a nucleic acid probe, primer or primer pair has a length to allow detection of a polynucleotide of interest, but a preferred length is about 10 to about 40 nucleotides.

[0584] Preferably, any nucleic acid probe, primer or primer pair used for detection of a polynucleotide fusion comprises a detectable label as mentioned herein.

[0585] Preferably, any nucleic acid probe, primer or primer pair is used in an assay to detect the presence of a polynucleotide fusion selected from VAPB-NRG1, CADM1-NRG1, CD44-NRG1, SLC3A2-NRG1, VTCN1-NRG1, CDH1-NRG1, CXADR-NRG1, GTF2E2-NRG1, CSMD1-NRG1, PTN-NRG1, ST14-NRG1, THBS1-NRG1, AGRN-NRG1, PVALB-NRG1, APP-NRG1, WRN-NRG1, DAAM1-NRG1, ASPH-NRG1, NOTCH2-NRG1, CD74-NRG1, SDC4-NRG1, SLC4A4-NRG1, ZFAT-NRG1 or DSCAML1-NRG1, in particular to detect the presence of fusion junctions as herein disclosed in said polynucleotide fusions.

[0586] Preferably, detecting the presence of any polynucleotide fusion mentioned herein is by using said probe, primer or primer pair that span the nucleic acid junction between NRG1 and its fusion partner allowing amplification of the fusion junction and detection thereof.

### Primer or Probes for Use in Assays for Detecting VAPB-NRG1 Fusions

[0587] The present disclosure provides a nucleic acid primer, primer pair or probe for detection of a polynucleotide fusion comprising a VAPB nucleic acid sequence (or a portion of a VAPB nucleic acid sequence fused with an NRG1 nucleic acid sequence (or a portion of a NRG1 nucleic acid sequence). Preferably, the nucleic acid probe, primer or primer pair specifically hybridizes to, or has 95%, 96%, 97%, 98%, 99% or preferably 100% sequence identity over a length of about 12 to about 40 nucleotides with, the polynucleotide according to SEQ ID NO: 23, or to an allelic variant of SEQ ID NO: 23, and the polynucleotide according to SEQ ID NO: 138, or to an allelic variant of SEQ ID NO: 138.

[0588] Also, the present disclosure provides a nucleic acid primer, primer pair or probe for detection of a VAPB-NRG1 polynucleotide fusion comprising or consisting of SEQ ID NO: 3, which sequence includes the nucleic acids at position 43 and 44. Preferably, the nucleic acid probe, primer or primer pair specifically hybridizes to, or has 95%, 96%, 97%, 98%, 99% or preferably 100% sequence identity over a length of about 12 to about 40 nucleotides over a length of about 12 to about 40 nucleotides with, the polynucleotide according to SEQ ID NO: 3, or to an allelic variant of SEQ ID NO: 3, which sequence preferably includes the nucleic acids at position 43 and 44.

[0589] Preferably, the nucleic acid probe, primer or primer pair for detection of the fusion of VAPB with NRG1 specifically hybridizes to (or has 95%, 96%, 97%, 98%, 99% or preferably 100% sequence identity over a length of about 12 to about 40 nucleotides over a length of about 12 to about 40 nucleotides with) a sequence, such as used in a gain-of-allele detection assay, comprised by exon 1 from VAPB, or a sequence located 5′ of exon 1 and/or to a sequence comprised by exon 2 from NRG1, or a sequence located 3′ of exon 2, such as a gene sequence of NRG1. Preferably, the nucleic acid probe, primer or primer pair for detection of the fusion of VAPB with NRG1 specifically hybridizes to or has 95%, 96%, 97%, 98%, 99% or preferably 100% sequence identity over a length of about 12 to about 40 nucleotides with a sequence comprised by SEQ ID NO: 17, or to an allelic variant of SEQ ID NO: 17; and/or to a sequence comprised by SEQ ID NO: 153, or to an allelic variant of SEQ ID NO: 153. Also provided are nucleic acid probe, primer or primer pair for detection of the fusions involving allelic variants of any one of said exons.

[0590] Preferably, exon 1 from VAPB comprises or consists of SEQ ID NO: 17 or an allelic variant thereof.

### Primer or Probes for Use in Assays for Detecting CADM1-NRG1 Fusions

[0591] The present disclosure provides a nucleic acid primer, primer pair or probe for detection of a CADM1-NRG1 polynucleotide fusion comprising or consisting of SEQ ID NO: 7, which sequence includes the nucleic acids at position 53 and 54. Preferably, the nucleic acid probe, primer or primer pair specifically hybridizes to, or has 95%, 96%, 97%, 98%, 99% or preferably 100% sequence identity over a length of about 12 to about 40 nucleotides with, the polynucleotide according to SEQ ID NO: 7, or to an allelic variant of SEQ ID NO: 7, which sequence preferably includes the nucleic acids at position 53 and 54.

[0592] Preferably, the nucleic acid probe, primer or primer pair for detection of the fusion of CADM1 with NRG1 specifically hybridizes to (or has 95%, 96%, 97%, 98%, 99% or preferably 100% sequence identity over a length of about 12 to about 40 nucleotides with) a sequence, such as used in a gain-of-allele detection assay, comprised by exon 7 from CADM1, or a sequence located 5′ of exon 7 and/or to a sequence comprised by exon 6 from NRG1, or a sequence located 3′ of exon 6, such as a gene sequence of NRG1. Preferably, the nucleic acid probe, primer or primer pair for detection of the fusion of CADM1 with NRG1 specifically hybridizes to or has 95%, 96%, 97%, 98%, 99% or preferably 100% sequence identity over a length of about 12 to about 40 nucleotides with a sequence comprised by SEQ ID NO: 57, or to an allelic variant of SEQ ID NO: 57; and/or to a sequence comprised by SEQ ID NO: 155, or to an allelic variant of SEQ ID NO: 155. Also provided are nucleic acid probe, primer or primer pair for detection of the fusions involving allelic variants of any one of said exons.

[0593] Preferably, exon 7 from CADM1 comprises or consists of SEQ ID NO: 39 or an allelic variant thereof.

### Primer or Probes for Use in Assays for Detecting CD44-NRG1 Fusions

[0594] The present disclosure provides a nucleic acid primer, primer pair or probe for detection of a CD44-NRG1 polynucleotide fusion comprising or consisting of SEQ ID NO: 11, which sequence includes the nucleic acids at position 52 and 53. Preferably, the nucleic acid probe, primer or primer pair specifically hybridizes to, or has 95%, 96%, 97%, 98%, 99% or preferably 100% sequence identity over a length of about 12 to about 40 nucleotides with, the polynucleotide according to SEQ ID NO: 11, or to an allelic variant of SEQ ID NO: 11, which sequence preferably includes the nucleic acids at position 52 and 53.

[0595] Preferably, the nucleic acid probe, primer or primer pair for detection of the fusion of CD44 with NRG1 specifically hybridizes to (or has 95%, 96%, 97%, 98%, 99% or preferably 100% sequence identity over a length of about 12 to about 40 nucleotides with) a sequence, such as used in a gain of allele detection assay, comprised by exon 5 from CD44, or a sequence located 5′ of exon 5 and/or to a sequence comprised by exon 2 from NRG1, or a sequence located 3′ of exon 2, such as a gene sequence of NRG1. Preferably, the nucleic acid probe, primer or primer pair for detection of the fusion of CD44 with NRG1 specifically hybridizes to or has 95%, 96%, 97%, 98%, 99% or preferably 100% sequence identity over a length of about 12 to about 40 nucleotides with a sequence comprised by SEQ ID NO: 99, or to an allelic variant of SEQ ID NO: 99; and/or to a sequence comprised by SEQ ID NO: 153, or to an allelic variant of SEQ ID NO: 153. Also provided are nucleic acid probe, primer or primer pair for detection of the fusions involving allelic variants of any one of said exons.

[0596] Preferably, exon 5 from CD44 comprises or consists of SEQ ID NO: 65 or an allelic variant thereof.

[0597] The present disclosure also provides a nucleic acid primer, primer pair or probe for detection of a CD44-NRG1 polynucleotide fusion comprising or consisting of SEQ ID NO: 761, which sequence includes the nucleic acids at position 75 and 76. Preferably, the nucleic acid probe, primer or primer pair specifically hybridizes to, or has 95%, 96%, 97%, 98%, 99% or preferably 100% sequence identity over a length of about 12 to about 40 nucleotides with, the polynucleotide according to SEQ ID NO: 761, or to an allelic variant of SEQ ID NO: 761, which sequence preferably includes the nucleic acids at position 75 and 76.

[0598] Preferably, the nucleic acid probe, primer or primer pair for detection of the fusion of CD44 with NRG1 specifically hybridizes to (or has 95%, 96%, 97%, 98%, 99% or preferably 100% sequence identity over a length of about 12 to about 40 nucleotides with) a sequence, such as used in a gain of allele detection assay, comprised by exon 5 from CD44, or a sequence located 5′ of exon 5 and/or to a sequence comprised by exon 6 from NRG1, or a sequence located 3′ of exon 6, such as a gene sequence of NRG1. Preferably, the nucleic acid probe, primer or primer pair for detection of the fusion of CD44 with NRG1 specifically hybridizes to or has 95%, 96%, 97%, 98%, 99% or preferably 100% sequence identity over a length of about 12 to about 40 nucleotides with a sequence comprised by SEQ ID NO: 99, or to an allelic variant of SEQ ID NO: 99; and/or to a sequence comprised by SEQ ID NO: 155, or to an allelic variant of SEQ ID NO: 155. Also provided are nucleic acid probe, primer or primer pair for detection of the fusions involving allelic variants of any one of said exons.

[0599] Preferably, exon 5 from CD44 comprises or consists of SEQ ID NO: 65 or an allelic variant thereof.

### Primer or Probes for Use in Assays for Detecting SLC3A2-NRG1 Fusions

[0600] The present disclosure provides a nucleic acid primer, primer pair or probe for detection of a SLC3A2 transcript version 6-NRG1 polynucleotide fusion comprising or consisting of SEQ ID NO: 15, which sequence includes the nucleic acids at position 53 and 54. Preferably, the nucleic acid probe, primer or primer pair specifically hybridizes to, or has 95%, 96%, 97%, 98%, 99% or preferably 100% sequence identity over a length of about 12 to about 40 nucleotides with, the polynucleotide according to SEQ ID NO: 15, or to an allelic variant of SEQ ID NO: 15, which sequence preferably includes the nucleic acids at position 53 and 54.

[0601] Preferably, the nucleic acid probe, primer or primer pair for detection of the fusion of transcript version 6 of SLC3A2 with NRG1 specifically hybridizes to (or has 95%, 96%, 97%, 98%, 99% or preferably 100% sequence identity over a length of about 12 to about 40 nucleotides with) a sequence, such as used in a gain-of-allele detection assay, comprised by exon 1 from said SLC3A2 or a sequence located 5′ of exon 1 and/or to a sequence comprised by exon 5 from NRG1, or a sequence located 3′ of exon 5, such as a gene sequence of NRG1. Preferably, the nucleic acid probe, primer or primer pair for detection of the fusion of said SLC3A2 with NRG1 specifically hybridizes to, or has 95%, 96%, 97%, 98%, 99% or preferably 100% sequence identity over a length of about 12 to about 40 nucleotides with, a sequence comprised by SEQ ID NO: 103, or to an allelic variant of SEQ ID NO: 103; and/or to a sequence comprised by SEQ ID NO: 157, or to an allelic variant of SEQ ID NO: 157. Also provided are nucleic acid probe, primer or primer pair for detection of the fusions involving allelic variants of any one of said exons.

[0602] Preferably, exon 1 from transcript version 6 of SLC3A2 comprises or consists of SEQ ID NO: 103, or an allelic variant thereof.

[0603] The present disclosure also provides a nucleic acid primer, primer pair or probe for detection of a SLC3A2 transcript version 3-NRG1 polynucleotide fusion comprising or consisting of SEQ ID NO: 454, which sequence includes the nucleic acids at position 93 and 94. Preferably, the nucleic acid probe, primer or primer pair specifically hybridizes to, or has 95%, 96%, 97%, 98%, 99% or preferably 100% sequence identity over a length of about 12 to about 40 nucleotides with, the polynucleotide according to SEQ ID NO: 454, or to an allelic variant of SEQ ID NO: 454, which sequence preferably includes the nucleic acids at position 93 and 94.

[0604] Preferably, the nucleic acid probe, primer or primer pair for detection of the fusion of transcript version 3 of SLC3A2 with NRG1 specifically hybridizes to (or has 95%, 96%, 97%, 98%, 99% or preferably 100% sequence identity over a length of about 12 to about 40 nucleotides with) a sequence, such as used in a gain of allele detection assay, comprised by exon 2 from said SLC3A2 or a sequence located 5′ of exon 2 and/or to a sequence comprised by exon 6 from NRG1, or a sequence located 3′ of exon 6, such as a gene sequence of NRG1. Preferably, the nucleic acid probe, primer or primer pair for detection of the fusion of said SLC3A2 with NRG1 specifically hybridizes to, or has 95%, 96%, 97%, 98%, 99% or preferably 100% sequence identity over a length of about 12 to about 40 nucleotides with, a sequence comprised by SEQ ID NO: 482, or to an allelic variant of SEQ ID NO: 482; and/or to a sequence comprised by SEQ ID NO: 155, or to an allelic variant of SEQ ID NO: 155. Also provided are nucleic acid probe, primer or primer pair for detection of the fusions involving allelic variants of any one of said exons.

[0605] Preferably, exon 2 from transcript version 3 of SLC3A2 comprises or consists of SEQ ID NO: 457, or an allelic variant thereof.

### Primer or Probes for Use in Assays for Detecting VTCN1-NRG1 Fusions

[0606] The present disclosure provides a nucleic acid primer, primer pair or probe for detection of a VTCN1-NRG1 polynucleotide fusion comprising or consisting of SEQ ID NO: 166, which sequence includes the nucleic acids at position 65 and 66. Preferably, the nucleic acid probe, primer or primer pair specifically hybridizes to, or has 95%, 96%, 97%, 98%, 99% or preferably 100% sequence identity over a length of about 12 to about 40 nucleotides with, the polynucleotide according to SEQ ID NO: 166, or to an allelic variant of SEQ ID NO: 166, which sequence preferably includes the nucleic acids at position 65 and 66.

[0607] Preferably, the nucleic acid probe, primer or primer pair for detection of the fusion of VTCN1 with NRG1 specifically hybridizes to (or has 95%, 96%, 97%, 98%, 99% or preferably 100% sequence identity over a length of about 12 to about 40 nucleotides with) a sequence, such as used in a gain-of-allele detection assay, comprised by exon 2 from VTCN1 or a sequence located 5′ of exon 2 and/or to a sequence comprised by exon 2 from NRG1, or a sequence located 3′ of exon 2, such as a gene sequence of NRG1. Preferably, the nucleic acid probe, primer or primer pair for detection of the fusion of VTCN1 with NRG1 specifically hybridizes to, or has 95%, 96%, 97%, 98%, 99% or preferably 100% sequence identity over a length of about 12 to about 40 nucleotides with, a sequence comprised by SEQ ID NO: 181, or to an allelic variant of SEQ ID NO: 181; and/or to a sequence comprised by SEQ ID NO: 153, or to an allelic variant of SEQ ID NO: 153. Also provided are nucleic acid probe, primer or primer pair for detection of the fusions involving allelic variants of any one of said exons.

[0608] Preferably, exon 2 from VTCN1 comprises or consists of SEQ ID NO: 169, or an allelic variant thereof.

### Primer or Probes for Use in Assays for Detecting CDH1-NRG1 Fusions

[0609] The present disclosure provides a nucleic acid primer, primer pair or probe for detection of a CDH1-NRG1 polynucleotide fusion comprising or consisting of SEQ ID NO: 186, which sequence includes the nucleic acids at position 119 and 120. Preferably, the nucleic acid probe, primer or primer pair specifically hybridizes to, or has 95%, 96%, 97%, 98%, 99% or preferably 100% sequence identity over a length of about 12 to about 40 nucleotides with, the polynucleotide according to SEQ ID NO: 186, or to an allelic variant of SEQ ID NO: 186, which sequence preferably includes the nucleic acids at position 119 and 120.

[0610] Preferably, the nucleic acid probe, primer or primer pair for detection of the fusion of CDH1 with NRG1 specifically hybridizes to (or has 95%, 96%, 97%, 98%, 99% or preferably 100% sequence identity over a length of about 12 to about 40 nucleotides with) a sequence, such as used in a gain-of-allele detection assay, comprised by exon 11 from CDH1 or a sequence located 5′ of exon 11 and/or to a sequence comprised by exon 2 from NRG1, or a sequence located 3′ of exon 2, such as a gene sequence of NRG1. Preferably, the nucleic acid probe, primer or primer pair for detection of the fusion of CDH1 with NRG1 specifically hybridizes to, or has 95%, 96%, 97%, 98%, 99% or preferably 95%, 96%, 97%, 98%, 99% or preferably 100% sequence identity over a length of about 12 to about 40 nucleotides with, a sequence comprised by SEQ ID NO: 213, or to an allelic variant of SEQ ID NO: 213; and/or to a sequence comprised by SEQ ID NO: 153, or to an allelic variant of SEQ ID NO: 153. Also provided are nucleic acid probe, primer or primer pair for detection of the fusions involving allelic variants of any one of said exons.

[0611] Preferably, exon 11 from CDH1 comprises or consists of SEQ ID NO: 198, or an allelic variant thereof.

### Primer or Probes for Use in Assays for Detecting CXADR-NRG1 Fusions

[0612] The present disclosure provides a nucleic acid primer, primer pair or probe for detection of a CXADR-NRG1 polynucleotide fusion comprising or consisting of SEQ ID NO: 217, which sequence includes the nucleic acids at position 43 and 44. Preferably, the nucleic acid probe, primer or primer pair specifically hybridizes to, or has 95%, 96%, 97%, 98%, 99% or preferably 100% sequence identity over a length of about 12 to about 40 nucleotides with, the polynucleotide according to SEQ ID NO: 217, or to an allelic variant of SEQ ID NO: 217, which sequence preferably includes the nucleic acids at position 43 and 44.

[0613] Preferably, the nucleic acid probe, primer or primer pair for detection of the fusion of CXADR with NRG1 specifically hybridizes to (or has 95%, 96%, 97%, 98%, 99% or preferably 100% sequence identity over a length of about 12 to about 40 nucleotides with) a sequence, such as used in a gain-of-allele detection assay, comprised by exon 1 from CXADR, or a sequence located 5′ of exon 1 and/or to a sequence comprised by exon 2 from NRG1, or a sequence located 3′ of exon 2, such as a gene sequence of NRG1. Preferably, the nucleic acid probe, primer or primer pair for detection of the fusion of CXADR with NRG1 specifically hybridizes to or has 95%, 96%, 97%, 98%, 99% or preferably 100% sequence identity over a length of about 12 to about 40 nucleotides with a sequence comprised by SEQ ID NO: 219, or to an allelic variant of SEQ ID NO: 219; and/or to a sequence comprised by SEQ ID NO: 153, or to an allelic variant of SEQ ID NO: 153. Also provided are nucleic acid probe, primer or primer pair for detection of the fusions involving allelic variants of any one of said exons.

[0614] Preferably, exon 1 from CXADR comprises or consists of SEQ ID NO: 219 or an allelic variant thereof.

### Primer or Probes for Use in Assays for Detecting GTF2E2-NRG1 Fusions

[0615] The present disclosure provides a nucleic acid primer, primer pair or probe for detection of a GTF2E2-NRG1 polynucleotide fusion comprising or consisting of SEQ ID NO: 233, which sequence includes the nucleic acids at position 141 and 142. Preferably, the nucleic acid probe, primer or primer pair specifically hybridizes to, or has 95%, 96%, 97%, 98%, 99% or preferably 100% sequence identity over a length of about 12 to about 40 nucleotides with, the polynucleotide according to SEQ ID NO: 233, or to an allelic variant of SEQ ID NO: 233, which sequence preferably includes the nucleic acids at position 141 and 142.

[0616] Preferably, the nucleic acid probe, primer or primer pair for detection of the fusion of GTF2E2 with NRG1 specifically hybridizes to (or has 95%, 96%, 97%, 98%, 99% or preferably 100% sequence identity over a length of about 12 to about 40 nucleotides with) a sequence, such as used in a gain-of-allele detection assay, comprised by exon 2 from GTF2E2, or a sequence located 5′ of exon 2 and/or to a sequence comprised by exon 2 from NRG1, or a sequence located 3′ of exon 2, such as a gene sequence of NRG1. Preferably, the nucleic acid probe, primer or primer pair for detection of the fusion of GTF2E2 with NRG1 specifically hybridizes to or has 95%, 96%, 97%, 98%, 99% or preferably 100% sequence identity over a length of about 12 to about 40 nucleotides with a sequence comprised by SEQ ID NO: 252, or to an allelic variant of SEQ ID NO: 252; and/or to a sequence comprised by SEQ ID NO: 153, or to an allelic variant of SEQ ID NO: 153. Also provided are nucleic acid probe, primer or primer pair for detection of the fusions involving allelic variants of any one of said exons.

[0617] Preferably, exon 2 from GTF2E2 comprises or consists of SEQ ID NO: 236 or an allelic variant thereof.

### Primer or Probes for Use in Assays for Detecting CSMD1-NRG1 Fusions

[0618] The present disclosure provides a nucleic acid primer, primer pair or probe for detection of a CSMD1-NRG1 polynucleotide fusion comprising or consisting of SEQ ID NO: 255, which sequence includes the nucleic acids at position 88 and 89. Preferably, the nucleic acid probe, primer or primer pair specifically hybridizes to, or has 95%, 96%, 97%, 98%, 99% or preferably 100% sequence identity over a length of about 12 to about 40 nucleotides with, the polynucleotide according to SEQ ID NO: 255, or to an allelic variant of SEQ ID NO: 255, which sequence preferably includes the nucleic acids at position 88 and 89.

[0619] Preferably, the nucleic acid probe, primer or primer pair for detection of the fusion of CSMD1 with NRG1 specifically hybridizes to (or has 95%, 96%, 97%, 98%, 99% or preferably 100% sequence identity over a length of about 12 to about 40 nucleotides with) a sequence, such as used in a gain-of-allele detection assay, comprised by exon 23 from CSMD1, or a sequence located 5′ of exon 23 and/or to a sequence comprised by exon 6 from NRG1, or a sequence located 3′ of exon 6, such as a gene sequence of NRG1. Preferably, the nucleic acid probe, primer or primer pair for detection of the fusion of CSMD1 with NRG1 specifically hybridizes to or has 95%, 96%, 97%, 98%, 99% or preferably 100% sequence identity over a length of about 12 to about 40 nucleotides with a sequence comprised by SEQ ID NO: 309, or to an allelic variant of SEQ ID NO: 309; and/or to a sequence comprised by SEQ ID NO: 155, or to an allelic variant of SEQ ID NO: 155. Also provided are nucleic acid probe, primer or primer pair for detection of the fusions involving allelic variants of any one of said exons.

[0620] Preferably, exon 23 from CSMD1 comprises or consists of SEQ ID NO: 279 or an allelic variant thereof.

### Primer or Probes for Use in Assays for Detecting PTN-NRG1 Fusions

[0621] The present disclosure provides a nucleic acid primer, primer pair or probe for detection of a PTN-NRG1 polynucleotide fusion comprising or consisting of SEQ ID NO: 313, which sequence includes the nucleic acids at position 102 and 103. Preferably, the nucleic acid probe, primer or primer pair specifically hybridizes to, or has 95%, 96%, 97%, 98%, 99% or preferably 100% sequence identity over a length of about 12 to about 40 nucleotides with, the polynucleotide according to SEQ ID NO: 313, or to an allelic variant of SEQ ID NO: 313, which sequence preferably includes the nucleic acids at position 102 and 103.

[0622] Preferably, the nucleic acid probe, primer or primer pair for detection of the fusion of PTN with NRG1 specifically hybridizes to (or has 95%, 96%, 97%, 98%, 99% or preferably 100% sequence identity over a length of about 12 to about 40 nucleotides with) a sequence, such as used in a gain-of-allele detection assay, comprised by exon 4 from PTN, or a sequence located 5′ of exon 4 and/or to a sequence comprised by exon 2 from NRG1, or a sequence located 3′ of exon 2, such as a gene sequence of NRG1. Preferably, the nucleic acid probe, primer or primer pair for detection of the fusion of PTN with NRG1 specifically hybridizes to or has 95%, 96%, 97%, 98%, 99% or preferably 100% sequence identity over a length of about 12 to about 40 nucleotides with a sequence comprised by SEQ ID NO: 326, or to an allelic variant of SEQ ID NO: 326; and/or to a sequence comprised by SEQ ID NO: 153, or to an allelic variant of SEQ ID NO: 153. Also provided are nucleic acid probe, primer or primer pair for detection of the fusions involving allelic variants of any one of said exons.

[0623] Preferably, exon 4 from PTN comprises or consists of SEQ ID NO: 318 or an allelic variant thereof.

### Primer or Probes for Use in Assays for Detecting ST14-NRG1 Fusions

[0624] The present disclosure provides a nucleic acid primer, primer pair or probe for detection of a ST14-NRG1 polynucleotide fusion comprising or consisting of SEQ ID NO: 330, which sequence includes the nucleic acids at position 95 and 96. Preferably, the nucleic acid probe, primer or primer pair specifically hybridizes to, or has 95%, 96%, 97%, 98%, 99% or preferably 100% sequence identity over a length of about 12 to about 40 nucleotides with, the polynucleotide according to SEQ ID NO: 330, or to an allelic variant of SEQ ID NO: 330, which sequence preferably includes the nucleic acids at position 95 and 96.

[0625] Preferably, the nucleic acid probe, primer or primer pair for detection of the fusion of ST14 with NRG1 specifically hybridizes to (or has 95%, 96%, 97%, 98%, 99% or preferably 100% sequence identity over a length of about 12 to about 40 nucleotides with) a sequence, such as used in a gain of allele detection assay, comprised by exon 11 from ST14, or a sequence located 5′ of exon 11 and/or to a sequence comprised by exon 6 from NRG1, or a sequence located 3′ of exon 6, such as a gene sequence of NRG1. Preferably, the nucleic acid probe, primer or primer pair for detection of the fusion of ST14 with NRG1 specifically hybridizes to or has 95%, 96%, 97%, 98%, 99% or preferably 100% sequence identity over a length of about 12 to about 40 nucleotides with a sequence comprised by SEQ ID NO: 372, or to an allelic variant of SEQ ID NO: 372; and/or to a sequence comprised by SEQ ID NO: 155, or to an allelic variant of SEQ ID NO: 155. Also provided are nucleic acid probe, primer or primer pair for detection of the fusions involving allelic variants of any one of said exons.

[0626] Preferably, exon 11 from ST14 comprises or consists of SEQ ID NO: 362 or an allelic variant thereof.

### Primer or Probes for Use in Assays for Detecting THBS1-NRG1 Fusions

[0627] The present disclosure provides a nucleic acid primer, primer pair or probe for detection of a THBS1-NRG1 polynucleotide fusion comprising or consisting of SEQ ID NO: 376, which sequence includes the nucleic acids at position 56 and 57. Preferably, the nucleic acid probe, primer or primer pair specifically hybridizes to, or has 95%, 96%, 97%, 98%, 99% or preferably 100% sequence identity over a length of about 12 to about 40 nucleotides with, the polynucleotide according to SEQ ID NO: 376, or to an allelic variant of SEQ ID NO: 376, which sequence preferably includes the nucleic acids at position 56 and 57.

[0628] Preferably, the nucleic acid probe, primer or primer pair for detection of the fusion of THBS1 with NRG1 specifically hybridizes to (or has 95%, 96%, 97%, 98%, 99% or preferably 100% sequence identity over a length of about 12 to about 40 nucleotides with) a sequence, such as used in a gain of allele detection assay, comprised by exon 9 from THBS1, or a sequence located 5′ of exon 9 and/or to a sequence comprised by exon 6 from NRG1, or a sequence located 3′ of exon 6, such as a gene sequence of NRG1. Preferably, the nucleic acid probe, primer or primer pair for detection of the fusion of THBS1 with NRG1 specifically hybridizes to or has 95%, 96%, 97%, 98%, 99% or preferably 100% sequence identity over a length of about 12 to about 40 nucleotides with a sequence comprised by SEQ ID NO: 399, or to an allelic variant of SEQ ID NO: 399; and/or to a sequence comprised by SEQ ID NO: 155, or to an allelic variant of SEQ ID NO: 155. Also provided are nucleic acid probe, primer or primer pair for detection of the fusions involving allelic variants of any one of said exons.

[0629] Preferably, exon 9 from THBS1 comprises or consists of SEQ ID NO: 386 or an allelic variant thereof.

### Primer or Probes for Use in Assays for Detecting AGRN-NRG1 Fusions

[0630] The present disclosure provides a nucleic acid primer, primer pair or probe for detection of a AGRN-NRG1 polynucleotide fusion comprising or consisting of SEQ ID NO: 403, which sequence includes the nucleic acids at position 106 and 107. Preferably, the nucleic acid probe, primer or primer pair specifically hybridizes to, or has 95%, 96%, 97%, 98%, 99% or preferably 100% sequence identity over a length of about 12 to about 40 nucleotides with, the polynucleotide according to SEQ ID NO: 403, or to an allelic variant of SEQ ID NO: 403, which sequence preferably includes the nucleic acids at position 106 and 107.

[0631] Preferably, the nucleic acid probe, primer or primer pair for detection of the fusion of AGRN with NRG1 specifically hybridizes to (or has 95%, 96%, 97%, 98%, 99% or preferably 100% sequence identity over a length of about 12 to about 40 nucleotides with) a sequence, such as used in a gain of allele detection assay, comprised by exon 12 from AGRN, or a sequence located 5′ of exon 12 and/or to a sequence comprised by exon 6 from NRG1, or a sequence located 3′ of exon 6, such as a gene sequence of NRG1. Preferably, the nucleic acid probe, primer or primer pair for detection of the fusion of AGRN with NRG1 specifically hybridizes to or has 95%, 96%, 97%, 98%, 99% or preferably 100% sequence identity over a length of about 12 to about 40 nucleotides with a sequence comprised by SEQ ID NO: 433, or to an allelic variant of SEQ ID NO: 433; and/or to a sequence comprised by SEQ ID NO: 155, or to an allelic variant of SEQ ID NO: 155. Also provided are nucleic acid probe, primer or primer pair for detection of the fusions involving allelic variants of any one of said exons.

[0632] Preferably, exon 12 from AGRN comprises or consists of SEQ ID NO: 416 or an allelic variant thereof.

### Primer or Probes for Use in Assays for Detecting PVALB-NRG1 Fusions

[0633] The present disclosure provides a nucleic acid primer, primer pair or probe for detection of a polynucleotide fusion comprising a PVALB nucleic acid sequence (or a portion of a PVALB nucleic acid sequence fused with an NRG1 nucleic acid sequence (or a portion of a NRG1 nucleic acid sequence). Preferably, the nucleic acid probe, primer or primer pair specifically hybridizes to, or has 95%, 96%, 97%, 98%, 99% or preferably 100% sequence identity over a length of about 12 to about 40 nucleotides with, the polynucleotide according to SEQ ID NO: 444, or to an allelic variant of SEQ ID NO: 444, and the polynucleotide according to SEQ ID NO: 138, or to an allelic variant of SEQ ID NO: 138.

[0634] Also, the present disclosure provides a nucleic acid primer, primer pair or probe for detection of a PVALB-NRG1 polynucleotide fusion comprising or consisting of SEQ ID NO: 437, which sequence includes the nucleic acids at position 102 and 103. Preferably, the nucleic acid probe, primer or primer pair specifically hybridizes to, or has 95%, 96%, 97%, 98%, 99% or preferably 100% sequence identity over a length of about 12 to about 40 nucleotides over a length of about 12 to about 40 nucleotides with, the polynucleotide according to SEQ ID NO: 437, or to an allelic variant of SEQ ID NO: 437, which sequence preferably includes the nucleic acids at position 102 and 103.

[0635] Preferably, the nucleic acid probe, primer or primer pair for detection of the fusion of PVALB with NRG1 specifically hybridizes to (or has 95%, 96%, 97%, 98%, 99% or preferably 100% sequence identity over a length of about 12 to about 40 nucleotides with) a sequence, such as used in a gain-of-allele detection assay, comprised by exon 4 from PVALB, or a sequence located 5′ of exon 4 and/or to a sequence comprised by exon 6 from NRG1, or a sequence located 3′ of exon 6, such as a gene sequence of NRG1. Preferably, the nucleic acid probe, primer or primer pair for detection of the fusion of PVALB with NRG1 specifically hybridizes to or has 95%, 96%, 97%, 98%, 99% or preferably 100% sequence identity over a length of about 12 to about 40 nucleotides with a sequence comprised by SEQ ID NO: 450, or to an allelic variant of SEQ ID NO: 450; and/or to a sequence comprised by SEQ ID NO: 155, or to an allelic variant of SEQ ID NO: 155. Also provided are nucleic acid probe, primer or primer pair for detection of the fusions involving allelic variants of any one of said exons.

[0636] Preferably, exon 4 from PVALB comprises or consists of SEQ ID NO: 442 or an allelic variant thereof.

### Primer or Probes for Use in Assays for Detecting APP-NRG1 Fusions

[0637] The present disclosure provides a nucleic acid primer, primer pair or probe for detection of a APP-NRG1 polynucleotide fusion comprising or consisting of SEQ ID NO: 486, which sequence includes the nucleic acids at position 54 and 55. Preferably, the nucleic acid probe, primer or primer pair specifically hybridizes to, or has 95%, 96%, 97%, 98%, 99% or preferably 100% sequence identity over a length of about 12 to about 40 nucleotides with, the polynucleotide according to SEQ ID NO: 486, or to an allelic variant of SEQ ID NO: 486, which sequence preferably includes the nucleic acids at position 54 and 55.

[0638] Preferably, the nucleic acid probe, primer or primer pair for detection of the fusion of APP with NRG1 specifically hybridizes to (or has 95%, 96%, 97%, 98%, 99% or preferably 100% sequence identity over a length of about 12 to about 40 nucleotides with) a sequence, such as used in a gain of allele detection assay, comprised by exon 14 from APP, or a sequence located 5′ of exon 14 and/or to a sequence comprised by exon 6 from NRG1, or a sequence located 3′ of exon 6, such as a gene sequence of NRG1. Preferably, the nucleic acid probe, primer or primer pair for detection of the fusion of APP with NRG1 specifically hybridizes to or has 95%, 96%, 97%, 98%, 99% or preferably 100% sequence identity over a length of about 12 to about 40 nucleotides with a sequence comprised by SEQ ID NO: 524, or to an allelic variant of SEQ ID NO: 524; and/or to a sequence comprised by SEQ ID NO: 155, or to an allelic variant of SEQ ID NO: 155. Also provided are nucleic acid probe, primer or primer pair for detection of the fusions involving allelic variants of any one of said exons.

[0639] Preferably, exon 14 from APP comprises or consists of SEQ ID NO: 501 or an allelic variant thereof.

### Primer or Probes for Use in Assays for Detecting WRN-NRG1 Fusions

[0640] The present disclosure provides a nucleic acid primer, primer pair or probe for detection of a WRN-NRG1 polynucleotide fusion comprising or consisting of SEQ ID NO: 528, which sequence includes the nucleic acids at position 96 and 97. Preferably, the nucleic acid probe, primer or primer pair specifically hybridizes to, or has 95%, 96%, 97%, 98%, 99% or preferably 100% sequence identity over a length of about 12 to about 40 nucleotides with, the polynucleotide according to SEQ ID NO: 528, or to an allelic variant of SEQ ID NO: 528, which sequence preferably includes the nucleic acids at position 96 and 97.

[0641] Preferably, the nucleic acid probe, primer or primer pair for detection of the fusion of WRN with NRG1 specifically hybridizes to (or has 95%, 96%, 97%, 98%, 99% or preferably 100% sequence identity over a length of about 12 to about 40 nucleotides with) a sequence, such as used in a gain of allele detection assay, comprised by exon 33 from WRN, or a sequence located 5′ of exon 33 and/or to a sequence comprised by exon 6 from NRG1, or a sequence located 3′ of exon 6, such as a gene sequence of NRG1. Preferably, the nucleic acid probe, primer or primer pair for detection of the fusion of WRN with NRG1 specifically hybridizes to or has 95%, 96%, 97%, 98%, 99% or preferably 100% sequence identity over a length of about 12 to about 40 nucleotides with a sequence comprised by SEQ ID NO: 601, or to an allelic variant of SEQ ID NO: 601; and/or to a sequence comprised by SEQ ID NO: 155, or to an allelic variant of SEQ ID NO: 155. Also provided are nucleic acid probe, primer or primer pair for detection of the fusions involving allelic variants of any one of said exons.

[0642] Preferably, exon 33 from WRN comprises or consists of SEQ ID NO: 562 or an allelic variant thereof.

### Primer or Probes for Use in Assays for Detecting DAAM1-NRG1 Fusions

[0643] The present disclosure provides a nucleic acid primer, primer pair or probe for detection of a DAAM1-NRG1 polynucleotide fusion comprising or consisting of SEQ ID NO: 605, which sequence includes the nucleic acids at position 75 and 76. Preferably, the nucleic acid probe, primer or primer pair specifically hybridizes to, or has 95%, 96%, 97%, 98%, 99% or preferably 100% sequence identity over a length of about 12 to about 40 nucleotides with, the polynucleotide according to SEQ ID NO: 605, or to an allelic variant of SEQ ID NO: 605, which sequence preferably includes the nucleic acids at position 75 and 76.

[0644] Preferably, the nucleic acid probe, primer or primer pair for detection of the fusion of DAAM1 with NRG1 specifically hybridizes to (or has 95%, 96%, 97%, 98%, 99% or preferably 100% sequence identity over a length of about 12 to about 40 nucleotides with) a sequence, such as used in a gain-of-allele detection assay, comprised by exon 1 from DAAM1 and/or to a sequence comprised by exon 1 from NRG1, or a sequence located 3′ of exon 1, such as a gene sequence of NRG1. Preferably, the nucleic acid probe, primer or primer pair for detection of the fusion of DAAM1 with NRG1 specifically hybridizes to or has 95%, 96%, 97%, 98%, 99% or preferably 100% sequence identity over a length of about 12 to about 40 nucleotides with a sequence comprised by SEQ ID NO: 606, or to an allelic variant of SEQ ID NO: 606; and/or to a sequence comprised by SEQ ID NO: 153, or to an allelic variant of SEQ ID NO: 153. Also provided are nucleic acid probe, primer or primer pair for detection of the fusions involving allelic variants of any one of said exons.

[0645] Preferably, exon 1 from DAAM1 comprises or consists of SEQ ID NO: 606 or an allelic variant thereof.

### Primer or Probes for Use in Assays for Detecting ASPH-NRG1 Fusions

[0646] The present disclosure provides a nucleic acid primer, primer pair or probe for detection of a polynucleotide fusion comprising a ASPH nucleic acid sequence (or a portion of a ASPH nucleic acid sequence fused with an NRG1 nucleic acid sequence (or a portion of a NRG1 nucleic acid sequence). Preferably, the nucleic acid probe, primer or primer pair specifically hybridizes to, or has 95%, 96%, 97%, 98%, 99% or preferably 100% sequence identity over a length of about 12 to about 40 nucleotides with, the polynucleotide according to SEQ ID NO: 662, or to an allelic variant of SEQ ID NO: 662, and the polynucleotide according to SEQ ID NO: 138, or to an allelic variant of SEQ ID NO: 138.

[0647] Also, the present disclosure provides a nucleic acid primer, primer pair or probe for detection of a ASPH-NRG1 polynucleotide fusion comprising or consisting of SEQ ID NO: 635, which sequence includes the nucleic acids at position 75 and 76. Preferably, the nucleic acid probe, primer or primer pair specifically hybridizes to, or has 95%, 96%, 97%, 98%, 99% or preferably 100% sequence identity over a length of about 12 to about 40 nucleotides over a length of about 12 to about 40 nucleotides with, the polynucleotide according to SEQ ID NO: 635, or to an allelic variant of SEQ ID NO: 635, which sequence preferably includes the nucleic acids at position 75 and 76.

[0648] Preferably, the nucleic acid probe, primer or primer pair for detection of the fusion of ASPH with NRG1 specifically hybridizes to (or has 95%, 96%, 97%, 98%, 99% or preferably 100% sequence identity over a length of about 12 to about 40 nucleotides with) a sequence, such as used in a gain-of-allele detection assay, comprised by exon 22 from ASPH, or a sequence located 5′ of exon 22 and/or to a sequence comprised by exon 2 from NRG1, or a sequence located 3′ of exon 2, such as a gene sequence of NRG1. Preferably, the nucleic acid probe, primer or primer pair for detection of the fusion of ASPH with NRG1 specifically hybridizes to or has 95%, 96%, 97%, 98%, 99% or preferably 100% sequence identity over a length of about 12 to about 40 nucleotides with a sequence comprised by SEQ ID NO: 689, or to an allelic variant of SEQ ID NO: 689; and/or to a sequence comprised by SEQ ID NO: 153, or to an allelic variant of SEQ ID NO: 153. Also provided are nucleic acid probe, primer or primer pair for detection of the fusions involving allelic variants of any one of said exons.

[0649] Preferably, exon 22 from ASPH comprises or consists of SEQ ID NO: 658 or an allelic variant thereof.

### Primer or Probes for Use in Assays for Detecting NOTCH2-NRG1 Fusions

[0650] The present disclosure provides a nucleic acid primer, primer pair or probe for detection of a NOTCH2-NRG1 polynucleotide fusion comprising or consisting of SEQ ID NO: 693, which sequence includes the nucleic acids at position 75 and 76. Preferably, the nucleic acid probe, primer or primer pair specifically hybridizes to, or has 95%, 96%, 97%, 98%, 99% or preferably 100% sequence identity over a length of about 12 to about 40 nucleotides with, the polynucleotide according to SEQ ID NO: 693, or to an allelic variant of SEQ ID NO: 693, which sequence preferably includes the nucleic acids at position 75 and 76.

[0651] Preferably, the nucleic acid probe, primer or primer pair for detection of the fusion of NOTCH2 with NRG1 specifically hybridizes to (or has 95%, 96%, 97%, 98%, 99% or preferably 100% sequence identity over a length of about 12 to about 40 nucleotides with) a sequence, such as used in a gain-of-allele detection assay, comprised by exon 6 from NOTCH2, or a sequence located 5′ of exon 6 and/or to a sequence comprised by exon 6 from NRG1, or a sequence located 3′ of exon 6, such as a gene sequence of NRG1. Preferably, the nucleic acid probe, primer or primer pair for detection of the fusion of NOTCH2 with NRG1 specifically hybridizes to or has 95%, 96%, 97%, 98%, 99% or preferably 100% sequence identity over a length of about 12 to about 40 nucleotides with a sequence comprised by SEQ ID NO: 713, or to an allelic variant of SEQ ID NO: 713; and/or to a sequence comprised by SEQ ID NO: 155, or to an allelic variant of SEQ ID NO: 155. Also provided are nucleic acid probe, primer or primer pair for detection of the fusions involving allelic variants of any one of said exons.

[0652] Preferably, exon 6 from NOTCH2 comprises or consists of SEQ ID NO: 700 or an allelic variant thereof.

### Primer or Probes for Use in Assays for Detecting CD74-NRG1 Fusions

[0653] The present disclosure provides a nucleic acid primer, primer pair or probe for detection of a CD74-NRG1 polynucleotide fusion comprising or consisting of SEQ ID NO: 717, which sequence includes the nucleic acids at position 75 and 76. Preferably, the nucleic acid probe, primer or primer pair specifically hybridizes to, or has 95%, 96%, 97%, 98%, 99% or preferably 100% sequence identity over a length of about 12 to about 40 nucleotides with, the polynucleotide according to SEQ ID NO: 717, or to an allelic variant of SEQ ID NO: 717, which sequence preferably includes the nucleic acids at position 75 and 76.

[0654] Preferably, the nucleic acid probe, primer or primer pair for detection of the fusion of CD74 with NRG1 specifically hybridizes to (or has 95%, 96%, 97%, 98%, 99% or preferably 100% sequence identity over a length of about 12 to about 40 nucleotides with) a sequence, such as used in a gain-of-allele detection assay, comprised by exon 2 from CD74, or a sequence located 5′ of exon 2 and/or to a sequence comprised by exon 2 from NRG1, or a sequence located 3′ of exon 2, such as a gene sequence of NRG1. Preferably, the nucleic acid probe, primer or primer pair for detection of the fusion of CD74 with NRG1 specifically hybridizes to or has 95%, 96%, 97%, 98%, 99% or preferably 100% sequence identity over a length of about 12 to about 40 nucleotides with a sequence comprised by SEQ ID NO: 739, or to an allelic variant of SEQ ID NO: 739; and/or to a sequence comprised by SEQ ID NO: 153, or to an allelic variant of SEQ ID NO: 153. Also provided are nucleic acid probe, primer or primer pair for detection of the fusions involving allelic variants of any one of said exons.

[0655] Preferably, exon 2 from CD74 comprises or consists of SEQ ID NO: 720 or an allelic variant thereof.

### Primer or Probes for Use in Assays for Detecting SDC4-NRG1 Fusions

[0656] The present disclosure provides a nucleic acid primer, primer pair or probe for detection of a SDC4-NRG1 polynucleotide fusion comprising or consisting of SEQ ID NO: 743, which sequence includes the nucleic acids at position 75 and 76. Preferably, the nucleic acid probe, primer or primer pair specifically hybridizes to, or has 95%, 96%, 97%, 98%, 99% or preferably 100% sequence identity over a length of about 12 to about 40 nucleotides with, the polynucleotide according to SEQ ID NO: 743, or to an allelic variant of SEQ ID NO: 743, which sequence preferably includes the nucleic acids at position 75 and 76.

[0657] Preferably, the nucleic acid probe, primer or primer pair for detection of the fusion of SDC4 with NRG1 specifically hybridizes to (or has 95%, 96%, 97%, 98%, 99% or preferably 100% sequence identity over a length of about 12 to about 40 nucleotides with) a sequence, such as used in a gain of allele detection assay, comprised by exon 2 from SDC4, or a sequence located 5′ of exon 2 and/or to a sequence comprised by exon 2 from NRG1, or a sequence located 3′ of exon 2, such as a gene sequence of NRG1. Preferably, the nucleic acid probe, primer or primer pair for detection of the fusion of SDC4 with NRG1 specifically hybridizes to or has 95%, 96%, 97%, 98%, 99% or preferably 100% sequence identity over a length of about 12 to about 40 nucleotides with a sequence comprised by SEQ ID NO: 757, or to an allelic variant of SEQ ID NO: 757; and/or to a sequence comprised by SEQ ID NO: 153, or to an allelic variant of SEQ ID NO: 153. Also provided are nucleic acid probe, primer or primer pair for detection of the fusions involving allelic variants of any one of said exons.

[0658] Preferably, exon 2 from SDC4 comprises or consists of SEQ ID NO: 746 or an allelic variant thereof.

[0659] The present disclosure provides a nucleic acid primer, primer pair or probe for detection of a SDC4-NRG1 polynucleotide fusion comprising or consisting of SEQ ID NO: 824, which sequence includes the nucleic acids at position 75 and 76. Preferably, the nucleic acid probe, primer or primer pair specifically hybridizes to, or has 95%, 96%, 97%, 98%, 99% or preferably 100% sequence identity over a length of about 12 to about 40 nucleotides with, the polynucleotide according to SEQ ID NO: 824, or to an allelic variant of SEQ ID NO: 824, which sequence preferably includes the nucleic acids at position 75 and 76.

[0660] Preferably, the nucleic acid probe, primer or primer pair for detection of the fusion of SDC4 with NRG1 specifically hybridizes to (or has 95%, 96%, 97%, 98%, 99% or preferably 100% sequence identity over a length of about 12 to about 40 nucleotides with) a sequence, such as used in a gain of allele detection assay, comprised by exon 4 from SDC4, or a sequence located 5′ of exon 4 and/or to a sequence comprised by exon 2 from NRG1, or a sequence located 3′ of exon 2, such as a gene sequence of NRG1. Preferably, the nucleic acid probe, primer or primer pair for detection of the fusion of SDC4 with NRG1 specifically hybridizes to or has 95%, 96%, 97%, 98%, 99% or preferably 100% sequence identity over a length of about 12 to about 40 nucleotides with a sequence comprised by SEQ ID NO: 940, or to an allelic variant of SEQ ID NO: 940; and/or to a sequence comprised by SEQ ID NO: 153, or to an allelic variant of SEQ ID NO: 153. Also provided are nucleic acid probe, primer or primer pair for detection of the fusions involving allelic variants of any one of said exons.

[0661] Preferably, exon 2 from SDC4 comprises or consists of SEQ ID NO: 748 or an allelic variant thereof.

### Primer or Probes for Use in Assays for Detecting SLC4A4-NRG1 Fusions

[0662] The present disclosure provides a nucleic acid primer, primer pair or probe for detection of a SLC4A4-NRG1 polynucleotide fusion comprising or consisting of SEQ ID NO: 765, which sequence includes the nucleic acids at position 75 and 76. Preferably, the nucleic acid probe, primer or primer pair specifically hybridizes to, or has 95%, 96%, 97%, 98%, 99% or preferably 100% sequence identity over a length of about 12 to about 40 nucleotides with, the polynucleotide according to SEQ ID NO: 765, or to an allelic variant of SEQ ID NO: 765, which sequence preferably includes the nucleic acids at position 75 and 76.

[0663] Preferably, the nucleic acid probe, primer or primer pair for detection of the fusion of SLC4A4 with NRG1 specifically hybridizes to (or has 95%, 96%, 97%, 98%, 99% or preferably 100% sequence identity over a length of about 12 to about 40 nucleotides with) a sequence, such as used in a gain-of-allele detection assay, comprised by exon 14 from SLC4A4, or a sequence located 5′ of exon 14 and/or to a sequence comprised by exon 6 from NRG1, or a sequence located 3′ of exon 6, such as a gene sequence of NRG1. Preferably, the nucleic acid probe, primer or primer pair for detection of the fusion of SLC4A4 with NRG1 specifically hybridizes to or has 95%, 96%, 97%, 98%, 99% or preferably 100% sequence identity over a length of about 12 to about 40 nucleotides with a sequence comprised by SEQ ID NO: 820, or to an allelic variant of SEQ ID NO: 820; and/or to a sequence comprised by SEQ ID NO: 155, or to an allelic variant of SEQ ID NO: 155. Also provided are nucleic acid probe, primer or primer pair for detection of the fusions involving allelic variants of any one of said exons.

[0664] Preferably, exon 14 from SLC4A4 comprises or consists of SEQ ID NO: 780 or an allelic variant thereof.

### Primer or Probes for Use in Assays for Detecting ZFAT-NRG1 Fusions

[0665] The present disclosure provides a nucleic acid primer, primer pair or probe for detection of a polynucleotide fusion comprising a ZFAT nucleic acid sequence (or a portion of a ZFAT nucleic acid sequence fused with an NRG1 nucleic acid sequence (or a portion of a NRG1 nucleic acid sequence). Preferably, the nucleic acid probe, primer or primer pair specifically hybridizes to, or has 95%, 96%, 97%, 98%, 99% or preferably 100% sequence identity over a length of about 12 to about 40 nucleotides with, the polynucleotide according to SEQ ID NO: 846, or to an allelic variant of SEQ ID NO: 846, and the polynucleotide according to SEQ ID NO: 138, or to an allelic variant of SEQ ID NO: 138.

[0666] Also, the present disclosure provides a nucleic acid primer, primer pair or probe for detection of a ZFAT-NRG1 polynucleotide fusion comprising or consisting of SEQ ID NO: 828, which sequence includes the nucleic acids at position 75 and 76. Preferably, the nucleic acid probe, primer or primer pair specifically hybridizes to, or has 95%, 96%, 97%, 98%, 99% or preferably 100% sequence identity over a length of about 12 to about 40 nucleotides over a length of about 12 to about 40 nucleotides with, the polynucleotide according to SEQ ID NO: 828, or to an allelic variant of SEQ ID NO: 828, which sequence preferably includes the nucleic acids at position 75 and 76.

[0667] Preferably, the nucleic acid probe, primer or primer pair for detection of the fusion of ZFAT with NRG1 specifically hybridizes to (or has 95%, 96%, 97%, 98%, 99% or preferably 100% sequence identity over a length of about 12 to about 40 nucleotides with) a sequence, such as used in a gain of allele detection assay, comprised by exon 12 from ZFAT, or a sequence located 5′ of exon 12 and/or to a sequence comprised by exon 6 from NRG1, or a sequence located 3′ of exon 6, such as a gene sequence of NRG1. Preferably, the nucleic acid probe, primer or primer pair for detection of the fusion of ZFAT with NRG1 specifically hybridizes to or has 95%, 96%, 97%, 98%, 99% or preferably 100% sequence identity over a length of about 12 to about 40 nucleotides with a sequence comprised by SEQ ID NO: 864, or to an allelic variant of SEQ ID NO: 864; and/or to a sequence comprised by SEQ ID NO: 155, or to an allelic variant of SEQ ID NO: 155. Also provided are nucleic acid probe, primer or primer pair for detection of the fusions involving allelic variants of any one of said exons.

[0668] Preferably, exon 12 from ZFAT comprises or consists of SEQ ID NO: 841 or an allelic variant thereof.

### Primer or Probes for Use in Assays for Detecting DSCAML1-NRG1 Fusions

[0669] The present disclosure provides a nucleic acid primer, primer pair or probe for detection of a polynucleotide fusion comprising a DSCAML1 nucleic acid sequence (or a portion of a DSCAML1 nucleic acid sequence fused with an NRG1 nucleic acid sequence (or a portion of a NRG1 nucleic acid sequence). Preferably, the nucleic acid probe, primer or primer pair specifically hybridizes to, or has 95%, 96%, 97%, 98%, 99% or preferably 100% sequence identity over a length of about 12 to about 40 nucleotides with, the polynucleotide according to SEQ ID NO: 903, or to an allelic variant of SEQ ID NO: 903, and the polynucleotide according to SEQ ID NO: 138, or to an allelic variant of SEQ ID NO: 138.

[0670] Also, the present disclosure provides a nucleic acid primer, primer pair or probe for detection of a DSCAML1-NRG1 polynucleotide fusion comprising or consisting of SEQ ID NO: 868, which sequence includes the nucleic acids at position 75 and 76. Preferably, the nucleic acid probe, primer or primer pair specifically hybridizes to, or has 95%, 96%, 97%, 98%, 99% or preferably 100% sequence identity over a length of about 12 to about 40 nucleotides over a length of about 12 to about 40 nucleotides with, the polynucleotide according to SEQ ID NO: 868, or to an allelic variant of SEQ ID NO: 868, which sequence preferably includes the nucleic acids at position 75 and 76.

[0671] Preferably, the nucleic acid probe, primer or primer pair for detection of the fusion of DSCAML1 with NRG1 specifically hybridizes to (or has 95%, 96%, 97%, 98%, 99% or preferably 100% sequence identity over a length of about 12 to about 40 nucleotides with) a sequence, such as used in a gain-of-allele detection assay, comprised by exon 3 from DSCAML1, or a sequence located 5′ of exon 3 and/or to a sequence comprised by exon 2 from NRG1, or a sequence located 3′ of exon 2, such as a gene sequence of NRG1. Preferably, the nucleic acid probe, primer or primer pair for detection of the fusion of DSCAML1 with NRG1 specifically hybridizes to or has 95%, 96%, 97%, 98%, 99% or preferably 100% sequence identity over a length of about 12 to about 40 nucleotides with a sequence comprised by SEQ ID NO: 938, or to an allelic variant of SEQ ID NO: 938; and/or to a sequence comprised by SEQ ID NO: 153, or to an allelic variant of SEQ ID NO: 153. Also provided are nucleic acid probe, primer or primer pair for detection of the fusions involving allelic variants of any one of said exons.

[0672] Preferably, exon 3 from DSCAML1 comprises or consists of SEQ ID NO: 872 or an allelic variant thereof.

### Probes for Use in In-Situ Hybridization

[0673] Also provided are probes for use in an in-situ hybridization (ISH) assay to detect any genetic rearrangements involving VAPB, CADM1, CD44, SLC3A2, VTCN1, CDH1, CXADR, GTF2E2, CSMD1, PTN, ST14, THBS1, AGRN, PVALB, APP, WRN, DAAM1, ASPH, NOTCH2, CD74, SDC4, SLC4A4, ZFAT or DSCAML1. In particular, the probes are for use in a fluorescence in-situ hybridization (FISH) or break apart FISH. The genetic rearrangement are preferably genetic fusions of VAPB, CADM1, CD44, SLC3A2, VTCN1 CDH1, CXADR, GTF2E2, CSMD1, PTN, ST14, THBS1, AGRN, PVALB, APP, WRN, DAAM1, ASPH, NOTCH2, CD74, SDC4, SLC4A4, ZFAT or DSCAML1 with NRG1, but since these ISH assays target the 5′ and 3′ sides of the herein disclosed fusion junctions, the ISH assays can be used to detect any genetic rearrangement that involve said genes.

[0674] Thus, in particular are provided a first and a second nucleic acid probe for use in an in-situ hybridization assay to detect a genetic rearrangement of VAPB, CADM1, CD44, SLC3A2, VTCN1, CDH1, CXADR, GTF2E2, CSMD1, PTN, ST14, THBS1, AGRN, PVALB, APP, WRN, DAAM1, ASPH, NOTCH2, CD74, SDC4, SLC4A4, ZFAT or DSCAML1, wherein:
[0675] the first probe for detection of a genetic rearrangement of VAPB specifically hybridizes to a VAPB sequence which is located 5′ from the nucleic acid of position 42 or 43 of SEQ ID NO: 1, and the second probe specifically hybridizes to a VAPB sequence which is located 3′ from the nucleic acid of position 42 or 43 of SEQ ID NO: 1;
[0676] the first probe for detection of a genetic rearrangement of CADM1 specifically hybridizes to a CADM1 sequence which is located 5′ from the nucleic acid of position 53 of SEQ ID NO: 5, and the second probe specifically hybridizes to a CADM1 sequence which is located 3′ from the nucleic acid of position 53 of SEQ ID NO: 5;
[0677] the first probe for detection of a genetic rearrangement of CD44 specifically hybridizes to a CD44 sequence which is located 5′ from the nucleic acid of position 52 of SEQ ID NO: 9, and the second probe specifically hybridizes to a CD44 sequence which is located 3′ from the nucleic acid of position 52 of SEQ ID NO: 9;
[0678] the first probe for detection of a genetic rearrangement of CD44 specifically hybridizes to a CD44 sequence which is located 5′ from the nucleic acid of position 75 of SEQ ID NO: 759, and the second probe specifically hybridizes to a CD44 sequence which is located 3′ from the nucleic acid of position 75 of SEQ ID NO: 759;
[0679] the first probe for detection of a genetic rearrangement of SLC3A2 specifically hybridizes to a SLC3A2 sequence which is located 5′ from the nucleic acid of position 53 of SEQ ID NO: 13, and the second probe specifically hybridizes to a SLC3A2 sequence which is located 3′ from the nucleic acid of position 53 of SEQ ID NO: 13;
[0680] the first probe for detection of a genetic rearrangement of VTCN1 specifically hybridizes to a VTCN1 sequence which is located 5′ from the nucleic acid of position 65 of SEQ ID NO: 164, and the second probe specifically hybridizes to a VTCN1 sequence which is located 3′ from the nucleic acid of position 65 of SEQ ID NO: 164;
[0681] the first probe for detection of a genetic rearrangement of CDH1 specifically hybridizes to a CDH1 sequence which is located 5′ from the nucleic acid of position 119 of SEQ ID NO: 184, and the second probe specifically hybridizes to a CDH1 sequence which is located 3′ from the nucleic acid of position 119 of SEQ ID NO: 184;
[0682] the first probe for detection of a genetic rearrangement of CXADR specifically hybridizes to a CXADR sequence which is located 5′ from the nucleic acid of position 43 of SEQ ID NO: 215, and the second probe specifically hybridizes to a CXADR sequence which is located 3′ from the nucleic acid of position 43 of SEQ ID NO: 215;
[0683] the first probe for detection of a genetic rearrangement of GTF2E2 specifically hybridizes to a GTF2E2 sequence which is located 5′ from the nucleic acid of position 141 of SEQ ID NO: 231, and the second probe specifically hybridizes to a GTF2E2 sequence which is located 3′ from the nucleic acid of position 141 of SEQ ID NO: 231;
[0684] the first probe for detection of a genetic rearrangement of CSMD1 specifically hybridizes to a CSMD1 sequence which is located 5′ from the nucleic acid of position 88 of SEQ ID NO: 253, and the second probe specifically hybridizes to a CSMD1 sequence which is located 3′ from the nucleic acid of position 88 of SEQ ID NO: 253;
[0685] the first probe for detection of a genetic rearrangement of PTN specifically hybridizes to a PTN sequence which is located 5′ from the nucleic acid of position 102 of SEQ ID NO: 311, and the second probe specifically hybridizes to a PTN sequence which is located 3′ from the nucleic acid of position 102 of SEQ ID NO: 311;
[0686] the first probe for detection of a genetic rearrangement of ST14 specifically hybridizes to a ST14 sequence which is located 5′ from the nucleic acid of position 95 of SEQ ID NO: 328, and the second probe specifically hybridizes to a ST14 sequence which is located 3′ from the nucleic acid of position 95 of SEQ ID NO: 328;
[0687] the first probe for detection of a genetic rearrangement of THBS1 specifically hybridizes to a THBS1 sequence which is located 5′ from the nucleic acid of position 56 of SEQ ID NO: 374, and the second probe specifically hybridizes to a THBS1 sequence which is located 3′ from the nucleic acid of position 56 of SEQ ID NO: 374;
[0688] the first probe for detection of a genetic rearrangement of AGRN specifically hybridizes to a AGRN sequence which is located 5′ from the nucleic acid of position 106 of SEQ ID NO: 401, and the second probe specifically hybridizes to a AGRN sequence which is located 3′ from the nucleic acid of position 106 of SEQ ID NO: 401;
[0689] the first probe for detection of a genetic rearrangement of PVALB specifically hybridizes to a PVALB sequence which is located 5′ from the nucleic acid of position 102 of SEQ ID NO: 435, and the second probe specifically hybridizes to a PVALB sequence which is located 3′ from the nucleic acid of position 102 of SEQ ID NO: 435;
[0690] the first probe for detection of a genetic rearrangement of SLC3A2 specifically hybridizes to a SLC3A2 sequence which is located 5′ from the nucleic acid of position 93 of SEQ ID NO: 452, and the second probe specifically hybridizes to a SLC3A2 sequence which is located 3′ from the nucleic acid of position 93 of SEQ ID NO: 452;
[0691] the first probe for detection of a genetic rearrangement of APP specifically hybridizes to a APP sequence which is located 5′ from the nucleic acid of position 54 of SEQ ID NO: 484, and the second probe specifically hybridizes to a APP sequence which is located 3′ from the nucleic acid of position 54 of SEQ ID NO: 484;
[0692] the first probe for detection of a genetic rearrangement of WRN specifically hybridizes to a WRN sequence which is located 5′ from the nucleic acid of position 96 of SEQ ID NO: 526, and the second probe specifically hybridizes to a WRN sequence which is located 3′ from the nucleic acid of position 96 of SEQ ID NO: 526;
[0693] the first probe for detection of a genetic rearrangement of DAAM1 specifically hybridizes to a DAAM1 sequence which is located 5′ from the nucleic acid of position 75 of SEQ ID NO: 603, and the second probe specifically hybridizes to a DAAM1 sequence which is located 3′ from the nucleic acid of position 75 of SEQ ID NO: 603;
[0694] the first probe for detection of a genetic rearrangement of ASPH specifically hybridizes to a ASPH sequence which is located 5′ from the nucleic acid of position 75 of SEQ ID NO: 633, and the second probe specifically hybridizes to a ASPH sequence which is located 3′ from the nucleic acid of position 75 of SEQ ID NO: 633;
[0695] the first probe for detection of a genetic rearrangement of NOTCH2 specifically hybridizes to a NOTCH2 sequence which is located 5′ from the nucleic acid of position 75 of SEQ ID NO: 691, and the second probe specifically hybridizes to a NOTCH2 sequence which is located 3′ from the nucleic acid of position 75 of SEQ ID NO: 691;
[0696] the first probe for detection of a genetic rearrangement of CD74 specifically hybridizes to a CD74 sequence which is located 5′ from the nucleic acid of position 75 of SEQ ID NO: 715, and the second probe specifically hybridizes to a CD74 sequence which is located 3′ from the nucleic acid of position 75 of SEQ ID NO: 715;
[0697] the first probe for detection of a genetic rearrangement of SDC4 specifically hybridizes to a SDC4 sequence which is located 5′ from the nucleic acid of position 75 of SEQ ID NO: 741, and the second probe specifically hybridizes to a SDC4 sequence which is located 3′ from the nucleic acid of position 75 of SEQ ID NO: 741;
[0698] the first probe for detection of a genetic rearrangement of SDC4 specifically hybridizes to a SDC4 sequence which is located 5′ from the nucleic acid of position 75 of SEQ ID NO: 822, and the second probe specifically hybridizes to a SDC4 sequence which is located 3′ from the nucleic acid of position 75 of SEQ ID NO: 822;
[0699] the first probe for detection of a genetic rearrangement of SLC4A4 specifically hybridizes to a SLC4A4 sequence which is located 5′ from the nucleic acid of position 75 of SEQ ID NO: 763, and the second probe specifically hybridizes to a SLC4A4 sequence which is located 3′ from the nucleic acid of position 75 of SEQ ID NO: 763;
[0700] the first probe for detection of a genetic rearrangement of ZFAT specifically hybridizes to a ZFAT sequence which is located 5′ from the nucleic acid of position 75 of SEQ ID NO: 826, and the second probe specifically hybridizes to a ZFAT sequence which is located 3′ from the nucleic acid of position 75 of SEQ ID NO: 826 or
[0701] the first probe for detection of a genetic rearrangement of DSCAML1 specifically hybridizes to a DSCAML1 sequence which is located 5′ from the nucleic acid of position 75 of SEQ ID NO: 866, and the second probe specifically hybridizes to a DSCAML1 sequence which is located 3′ from the nucleic acid of position 75 of SEQ ID NO: 866.

[0702] Alternatively, there is provided a preferred ISH assay wherein any polynucleotide fusion selected from VAPB-NRG1, CADM1-NRG1, CD44-NRG1, SLC3A2-NRG1, VTCN1. NRG1, CDH1-NRG1, CXADR-NRG1, GTF2E2-NRG1, CSMD1-NRG1, PTN-NRG1, ST14-NRG1, THBS1-NRG1, AGRN-NRG1, PVALB-NRG1, APP-NRG1, WRN-NRG1, DAAM1-NRG1, ASPH-NRG1, NOTCH2-NRG1, CD74-NRG1, SDC4-NRG1, SLC4A4-NRG1, ZFAT-NRG1 or DSCAML1-NRG1 is detected. Said assay makes use of a first and second probe, wherein if the first probe hybridizes to a sequence of the 5′ side of the fusion junction, the second probe hybridizes to a sequence of the other side, or if the first probe hybridizes to a sequence of the 3′ side of the fusion junction, the second probe hybridizes to a sequence of the other side, and wherein the first probe hybridizes to a sequence selected from VAPB, CADM1, CD44, SLC3A2, VTCN1, CDH1, CXADR, GTF2E2, CSMD1, PTN, ST14, THBS1, AGRN, PVALB, APP, WRN, DAAM1, ASPH, NOTCH2, CD74, SDC4, SLC4A4, ZFAT or DSCAML1, and the second probe hybridizes to an NRG1 sequence, preferably a sequence of the EGF-like domain such as mentioned herein. Including a probe that hybridizes to an EGF-like domain places said domain in the vicinity of the NRG1 fusion partner sequence.

[0703] In particular is provided, a first and a second nucleic acid probe for use in an in-situ hybridization assay to detect a VAPB-NRG1 fusion, wherein the first probe specifically hybridizes to a VAPB sequence which is located 5′ from the nucleic acid of position 42 or 43 of SEQ ID NO: 3, and the second probe specifically hybridizes to a NRG1 sequence which is located 3′ from the nucleic acid of position 43 or 44 of SEQ ID NO: 3, such as a sequence comprised by the EGF-like domain of the present disclosure, in particular that of SEQ ID NO: 163.

[0704] In particular is also provided, a first and a second nucleic acid probe for use in an in-situ hybridization assay to detect a CADM1-NRG1 fusion, wherein the first probe specifically hybridizes to a CADM1 sequence which is located 5′ from the nucleic acid of position 53 of SEQ ID NO: 7, and the second probe specifically hybridizes to a NRG1 sequence which is located 3′ from the nucleic acid of position 54 of SEQ ID NO: 7, such as a sequence comprised by the EGF-like domain of the present disclosure, in particular that of SEQ ID NO: 163.

[0705] In particular is also provided, a first and a second nucleic acid probe for use in an in-situ hybridization assay to detect a CD44-NRG1 fusion, wherein the first probe specifically hybridizes to a CD44 sequence which is located 5′ from the nucleic acid of position 52 of SEQ ID NO: 11, and the second probe specifically hybridizes to a NRG1 sequence which is located 3′ from the nucleic acid of position 53 of SEQ ID NO: 11, such as a sequence comprised by the EGF-like domain of the present disclosure, in particular that of SEQ ID NO: 163.

[0706] In particular is also provided, a first and a second nucleic acid probe for use in an in-situ hybridization assay to detect a CD44-NRG1 fusion, wherein the first probe specifically hybridizes to a CD44 sequence which is located 5′ from the nucleic acid of position 75 of SEQ ID NO: 761, and the second probe specifically hybridizes to a NRG1 sequence which is located 3′ from the nucleic acid of position 76 of SEQ ID NO: 761, such as a sequence comprised by the EGF-like domain of the present disclosure, in particular that of SEQ ID NO: 163.

[0707] In particular is also provided, a first and a second nucleic acid probe for use in an in-situ hybridization assay to detect a SLC3A2-NRG1 fusion, wherein the first probe specifically hybridizes to a SLC3A2 sequence which is located 5′ from the nucleic acid of position 53 of SEQ ID NO: 15, and the second probe specifically hybridizes to a NRG1 sequence which is located 3′ from the nucleic acid of position 54 of SEQ ID NO: 15, such as a sequence comprised by the EGF-like domain of the present disclosure, in particular that of SEQ ID NO: 163.

[0708] In particular is also provided, a first and a second nucleic acid probe for use in an in-situ hybridization assay to detect a VTCN1-NRG1 fusion, wherein the first probe specifically hybridizes to a VTCN1 sequence which is located 5′ from the nucleic acid of position 65 of SEQ ID NO: 166, and the second probe specifically hybridizes to a VTCN1 sequence which is located 3′ from the nucleic acid of position 66 of SEQ ID NO: 166, such as a sequence comprised by the EGF-like domain of the present disclosure, in particular that of SEQ ID NO: 163.

[0709] In particular is also provided, a first and a second nucleic acid probe for use in an in-situ hybridization assay to detect a CDH1-NRG1 fusion, wherein the first probe specifically hybridizes to a CDH1 sequence which is located 5′ from the nucleic acid of position 119 of SEQ ID NO: 186, and the second probe specifically hybridizes to a CDH1 sequence which is located 3′ from the nucleic acid of position 120 of SEQ ID NO: 186, such as a sequence comprised by the EGF-like domain of the present disclosure, in particular that of SEQ ID NO: 163.

[0710] In particular is also provided, a first and a second nucleic acid probe for use in an in-situ hybridization assay to detect a CXADR-NRG1 fusion, wherein the first probe specifically hybridizes to a CXADR sequence which is located 5′ from the nucleic acid of position 43 of SEQ ID NO: 217, and the second probe specifically hybridizes to a CXADR sequence which is located 3′ from the nucleic acid of position 44 of SEQ ID NO: 217, such as a sequence comprised by the EGF-like domain of the present disclosure, in particular that of SEQ ID NO: 163.

[0711] In particular is also provided, a first and a second nucleic acid probe for use in an in-situ hybridization assay to detect a GTF2E2-NRG1 fusion, wherein the first probe specifically hybridizes to a GTF2E2 sequence which is located 5′ from the nucleic acid of position 141 of SEQ ID NO: 233, and the second probe specifically hybridizes to a GTF2E2 sequence which is located 3′ from the nucleic acid of position 142 of SEQ ID NO: 233, such as a sequence comprised by the EGF-like domain of the present disclosure, in particular that of SEQ ID NO: 163.

[0712] In particular is also provided, a first and a second nucleic acid probe for use in an in-situ hybridization assay to detect a CSMD1-NRG1 fusion, wherein the first probe specifically hybridizes to a CSMD1 sequence which is located 5′ from the nucleic acid of position 88 of SEQ ID NO: 255, and the second probe specifically hybridizes to a CSMD1 sequence which is located 3′ from the nucleic acid of position 89 of SEQ ID NO: 255, such as a sequence comprised by the EGF-like domain of the present disclosure, in particular that of SEQ ID NO: 163.

[0713] In particular is also provided, a first and a second nucleic acid probe for use in an in-situ hybridization assay to detect a PTN-NRG1 fusion, wherein the first probe specifically hybridizes to a PTN sequence which is located 5′ from the nucleic acid of position 102 of SEQ ID NO: 313, and the second probe specifically hybridizes to a PTN sequence which is located 3′ from the nucleic acid of position 103 of SEQ ID NO: 313, such as a sequence comprised by the EGF-like domain of the present disclosure, in particular that of SEQ ID NO: 163.

[0714] In particular is also provided, a first and a second nucleic acid probe for use in an in-situ hybridization assay to detect a ST14-NRG1 fusion, wherein the first probe specifically hybridizes to a ST14 sequence which is located 5′ from the nucleic acid of position 95 of SEQ ID NO: 330, and the second probe specifically hybridizes to a ST14 sequence which is located 3′ from the nucleic acid of position 96 of SEQ ID NO: 330, such as a sequence comprised by the EGF-like domain of the present disclosure, in particular that of SEQ ID NO: 163.

[0715] In particular is also provided, a first and a second nucleic acid probe for use in an in-situ hybridization assay to detect a THBS1-NRG1 fusion, wherein the first probe specifically hybridizes to a THBS1 sequence which is located 5′ from the nucleic acid of position 56 of SEQ ID NO: 376, and the second probe specifically hybridizes to a THBS1 sequence which is located 3′ from the nucleic acid of position 57 of SEQ ID NO: 376, such as a sequence comprised by the EGF-like domain of the present disclosure, in particular that of SEQ ID NO: 163.

[0716] In particular is also provided, a first and a second nucleic acid probe for use in an in-situ hybridization assay to detect a AGRN-NRG1 fusion, wherein the first probe specifically hybridizes to a AGRN sequence which is located 5′ from the nucleic acid of position 106 of SEQ ID NO: 403, and the second probe specifically hybridizes to a AGRN sequence which is located 3′ from the nucleic acid of position 107 of SEQ ID NO: 403, such as a sequence comprised by the EGF-like domain of the present disclosure, in particular that of SEQ ID NO: 163.

[0717] In particular is also provided, a first and a second nucleic acid probe for use in an in-situ hybridization assay to detect a PVALB-NRG1 fusion, wherein the first probe specifically hybridizes to a PVALB sequence which is located 5′ from the nucleic acid of position 102 of SEQ ID NO: 437, and the second probe specifically hybridizes to a PVALB sequence which is located 3′ from the nucleic acid of position 103 of SEQ ID NO: 437, such as a sequence comprised by the EGF-like domain of the present disclosure, in particular that of SEQ ID NO: 163.

[0718] In particular is also provided, a first and a second nucleic acid probe for use in an in-situ hybridization assay to detect a SLC3A2-NRG1 fusion, wherein the first probe specifically hybridizes to a SLC3A2 sequence which is located 5′ from the nucleic acid of position 93 of SEQ ID NO: 454, and the second probe specifically hybridizes to a SLC3A2 sequence which is located 3′ from the nucleic acid of position 94 of SEQ ID NO: 454, such as a sequence comprised by the EGF-like domain of the present disclosure, in particular that of SEQ ID NO: 163.

[0719] In particular is also provided, a first and a second nucleic acid probe for use in an in-situ hybridization assay to detect a APP-NRG1 fusion, wherein the first probe specifically hybridizes to a APP sequence which is located 5′ from the nucleic acid of position 54 of SEQ ID NO: 486, and the second probe specifically hybridizes to a NRG1 sequence which is located 3′ from the nucleic acid of position 55 of SEQ ID NO: 486, such as a sequence comprised by the EGF-like domain of the present disclosure, in particular that of SEQ ID NO: 163.

[0720] In particular is also provided, a first and a second nucleic acid probe for use in an in-situ hybridization assay to detect a WRN-NRG1 fusion, wherein the first probe specifically hybridizes to a WRN sequence which is located 5′ from the nucleic acid of position 96 of SEQ ID NO: 528, and the second probe specifically hybridizes to a NRG1 sequence which is located 3′ from the nucleic acid of position 97 of SEQ ID NO: 528, such as a sequence comprised by the EGF-like domain of the present disclosure, in particular that of SEQ ID NO: 163.

[0721] In particular is also provided, a first and a second nucleic acid probe for use in an in-situ hybridization assay to detect a DAAM1-NRG1 fusion, wherein the first probe specifically hybridizes to a DAAM1 sequence which is located 5′ from the nucleic acid of position 75 of SEQ ID NO: 605, and the second probe specifically hybridizes to a NRG1 sequence which is located 3′ from the nucleic acid of position 76 of SEQ ID NO: 605, such as a sequence comprised by the EGF-like domain of the present disclosure, in particular that of SEQ ID NO: 163.

[0722] In particular is also provided, a first and a second nucleic acid probe for use in an in-situ hybridization assay to detect a ASPH-NRG1 fusion, wherein the first probe specifically hybridizes to a ASPH sequence which is located 5′ from the nucleic acid of position 75 of SEQ ID NO: 635, and the second probe specifically hybridizes to a NRG1 sequence which is located 3′ from the nucleic acid of position 76 of SEQ ID NO: 635, such as a sequence comprised by the EGF-like domain of the present disclosure, in particular that of SEQ ID NO: 163.

[0723] In particular is also provided, a first and a second nucleic acid probe for use in an in-situ hybridization assay to detect a NOTCH2-NRG1 fusion, wherein the first probe specifically hybridizes to a NOTCH2 sequence which is located 5′ from the nucleic acid of position 75 of SEQ ID NO: 693, and the second probe specifically hybridizes to a NRG1 sequence which is located 3′ from the nucleic acid of position 76 of SEQ ID NO: 693, such as a sequence comprised by the EGF-like domain of the present disclosure, in particular that of SEQ ID NO: 163.

[0724] In particular is also provided, a first and a second nucleic acid probe for use in an in-situ hybridization assay to detect a CD74-NRG1 fusion, wherein the first probe specifically hybridizes to a CD74 sequence which is located 5′ from the nucleic acid of position 75 of SEQ ID NO: 717, and the second probe specifically hybridizes to a NRG1 sequence which is located 3′ from the nucleic acid of position 76 of SEQ ID NO: 717, such as a sequence comprised by the EGF-like domain of the present disclosure, in particular that of SEQ ID NO: 163.

[0725] In particular is also provided, a first and a second nucleic acid probe for use in an in-situ hybridization assay to detect a SDC4-NRG1 fusion, wherein the first probe specifically hybridizes to a SDC4 sequence which is located 5′ from the nucleic acid of position 75 of SEQ ID NO: 743, and the second probe specifically hybridizes to a NRG1 sequence which is located 3′ from the nucleic acid of position 76 of SEQ ID NO: 743, such as a sequence comprised by the EGF-like domain of the present disclosure, in particular that of SEQ ID NO: 163.

[0726] In particular is also provided, a first and a second nucleic acid probe for use in an in-situ hybridization assay to detect a SDC4-NRG1 fusion, wherein the first probe specifically hybridizes to a SDC4 sequence which is located 5′ from the nucleic acid of position 75 of SEQ ID NO: 824, and the second probe specifically hybridizes to a NRG1 sequence which is located 3′ from the nucleic acid of position 76 of SEQ ID NO: 824, such as a sequence comprised by the EGF-like domain of the present disclosure, in particular that of SEQ ID NO: 163.

[0727] In particular is also provided, a first and a second nucleic acid probe for use in an in-situ hybridization assay to detect a SLC4A4-NRG1 fusion, wherein the first probe specifically hybridizes to a SLC4A4 sequence which is located 5′ from the nucleic acid of position 75 of SEQ ID NO: 765, and the second probe specifically hybridizes to a NRG1 sequence which is located 3′ from the nucleic acid of position 76 of SEQ ID NO: 765, such as a sequence comprised by the EGF-like domain of the present disclosure, in particular that of SEQ ID NO: 163.

[0728] In particular is also provided, a first and a second nucleic acid probe for use in an in-situ hybridization assay to detect a ZFAT-NRG1 fusion, wherein the first probe specifically hybridizes to a ZFAT sequence which is located 5′ from the nucleic acid of position 75 of SEQ ID NO: 828, and the second probe specifically hybridizes to a NRG1 sequence which is located 3′ from the nucleic acid of position 76 of SEQ ID NO: 828, such as a sequence comprised by the EGF-like domain of the present disclosure, in particular that of SEQ ID NO: 163.

[0729] In particular is also provided, a first and a second nucleic acid probe for use in an in-situ hybridization assay to detect a DSCAML1-NRG1 fusion, wherein the first probe specifically hybridizes to a DSCAML1 sequence which is located 5′ from the nucleic acid of position 75 of SEQ ID NO: 868, and the second probe specifically hybridizes to a NRG1 sequence which is located 3′ from the nucleic acid of position 76 of SEQ ID NO: 868, such as a sequence comprised by the EGF-like domain of the present disclosure, in particular that of SEQ ID NO: 163.

[0730] Any of the herein mentioned nucleic acid probe, primer or primer pair is preferably used in the following identification or detection methods for detection of any one of the polynucleotide, polypeptide fusions, portions or allelic variants thereof, selected from VAPB-NRG1, CADM1-NRG1 CD44-NRG1, SLC3A2-NRG1, VTCN1-NRG1, CDH1-NRG1, CXADR-NRG1, GTF2E2-NRG1, CSMD1-NRG1, PTN-NRG1, ST14-NRG1, THBS1-NRG1, AGRN-NRG1, PVALB-NRG1, APP-NRG1, WRN-NRG1, DAAM1-NRG1, ASPH-NRG1, NOTCH2-NRG1, CD74-NRG1, SDC4-NRG1, SLC4A4-NRG1, ZFAT-NRG1 and DSCAML1-NRG1.

### Assays for Detecting NRG Polynucleotide Fusions

[0731] According to the present disclosure, there is provided a method for identifying in a sample any polynucleotide fusion as mentioned herein, or a polypeptide encoded therefrom, said method comprising testing a sample obtained from a subject to detect the presence of the fusion in the sample.

[0732] Also provided is a method for detecting in a sample the presence of a polynucleotide fusion, or a polypeptide encoded therefrom, said method comprising testing a sample obtained from a subject to detect the presence of the fusion in the sample.

[0733] Also provided is a method for establishing whether an aberrant cell from a subject comprises a polynucleotide fusion, or a polypeptide encoded therefrom, said method comprising testing the polynucleotide or polypeptide contents of an aberrant cell obtained from the subject for the presence of the fusion in the sample.

[0734] Also provided is a method for identifying a subject as carrying a polynucleotide fusion, or a polypeptide encoded therefrom said method comprising testing a sample obtained from a subject and detecting the presence of the fusion in the sample. The testing is preferably followed by a step of associating the detected fusion in the sample with the subject as carrying the fusion.

[0735] Preferably, said testing comprises detecting any polynucleotide or polypeptide fusion as mentioned herein by utilizing a binding agent that specifically binds the polynucleotide, such as any nucleic acid probe, primer or primer pair as mentioned herein, or that specifically binds a polypeptide encoded from any polynucleotide fusion as mentioned herein, or alternatively utilizing a binding agent that binds a polynucleotide that comprises the polynucleotide fusion. The binding agent is utilized as part of a detection step or to allow detection is a subsequent step. Thus, the testing in any one of the methods of the disclosure preferably comprises utilizing a binding agent that specifically binds any polynucleotide fusion, or any polypeptide encoded therefrom, to detect such fusion. Said binding agent preferably comprises or consists of a primer, a primer pair, a probe or an antibody. Also, the binding agent preferably comprises a detectable label.

[0736] Alternatively, the testing comprises utilizing a binding agent that binds a polynucleotide that comprises the polynucleotide fusion to detect the fusion. In this alternative, the binding agent binds a polynucleotide that is located 5′ and/or 3′ of the polynucleotide fusion that contains the actual junction between NRG1 and its fusion partner. The polynucleotide to which the binding agent anneals or hybridizes, functions as an adaptor which is ligated, or otherwise attached, to the polynucleotide fusion after which the fusion is detected. Such an adaptor preferably comprises a tag or molecular barcode, such as used in sequencing methodologies that include Next Generation Sequencing. Such an adaptor, preferably comprising a barcode or tag, is attached to the polynucleotide fusion which enables detection of said fusion after amplification. In particular, the binding agent can be used in Anchored Multiplex PCR (or AMP), wherein after cDNA generation from mRNA, a target-enriched library for NGS is obtained.

[0737] Preferably, said binding agent specifically binds a polynucleotide sequence according to any of SEQ ID NO: 1, SEQ ID NO: 2, SEQ ID NO: 3, SEQ ID NO: 5, SEQ ID NO: 6, SEQ ID NO: 7, SEQ ID NO: 9, SEQ ID NO: 10, SEQ ID NO: 11, SEQ ID NO: 13, SEQ ID NO: 14, SEQ ID NO: 15, SEQ ID NO: 164, SEQ ID NO: 165, SEQ ID NO: 166, SEQ ID NO: 184, SEQ ID NO: 185, SEQ ID NO: 186, SEQ ID NO: 215, SEQ ID NO: 216, SEQ ID NO:217, SEQ ID NO:231, SEQ ID NO:232, SEQ ID NO:233, SEQ ID NO:253, SEQ ID NO:254, SEQ ID NO: 255, SEQ ID NO:311, SEQ ID NO:312, SEQ ID NO:313, SEQ ID NO:328, SEQ ID NO: 329, SEQ ID NO:330, SEQ ID NO:374, SEQ ID NO:375, SEQ ID NO:376, SEQ ID NO: 401, SEQ ID NO:402, SEQ ID NO:403, SEQ ID NO:435, SEQ ID NO:436, SEQ ID NO: 437, SEQ ID NO:452, SEQ ID NO:453, SEQ ID NO:454; SEQ ID NO: 484, SEQ ID NO: 485, SEQ ID NO: 486, SEQ ID NO: 526, SEQ ID NO: 527, SEQ ID NO: 528, SEQ ID NO: 603, SEQ ID NO: 604, SEQ ID NO: 605, SEQ ID NO: 633, SEQ ID NO: 634, SEQ ID NO: 635, SEQ ID NO: 691, SEQ ID NO: 692, SEQ ID NO: 693, SEQ ID NO: 715, SEQ ID NO: 716, SEQ ID NO: 717, SEQ ID NO: 741, SEQ ID NO: 742, SEQ ID NO: 743, SEQ ID NO: 759, SEQ ID NO: 760, SEQ ID NO: 761, SEQ ID NO: 763, SEQ ID NO: 764, SEQ ID NO: 765, SEQ ID NO: 822, SEQ ID NO: 823, SEQ ID NO: 824, SEQ ID NO: 826, SEQ ID NO: 827, SEQ ID NO: 828, SEQ ID NO: 866, SEQ ID NO: 867 or SEQ ID NO: 868. These sequences allow for specific hybridization in close proximity of the fusion junction of interest, or even contain the fusion junction, making for good candidate sequences for binding by said binding agent.

[0738] Alternatively, the binding agent specifically binds a polynucleotide sequence that comprises a sequence according to any of SEQ ID NO: 1, SEQ ID NO: 2, SEQ ID NO: 3, SEQ ID NO: 5, SEQ ID NO: 6, SEQ ID NO: 7, SEQ ID NO: 9, SEQ ID NO: 10, SEQ ID NO: 11, SEQ ID NO: 13, SEQ ID NO: 14, SEQ ID NO: 15, SEQ ID NO: 164, SEQ ID NO: 165, SEQ ID NO: 166, SEQ ID NO: 184, SEQ ID NO: 185, SEQ ID NO: 186, SEQ ID NO: 215, SEQ ID NO: 216, SEQ ID NO:217, SEQ ID NO:231, SEQ ID NO:232, SEQ ID NO:233, SEQ ID NO: 253, SEQ ID NO:254, SEQ ID NO:255, SEQ ID NO:311, SEQ ID NO:312, SEQ ID NO: 313, SEQ ID NO:328, SEQ ID NO:329, SEQ ID NO:330, SEQ ID NO:374, SEQ ID NO: 375, SEQ ID NO:376, SEQ ID NO:401, SEQ ID NO:402, SEQ ID NO:403, SEQ ID NO: 435, SEQ ID NO:436, SEQ ID NO:437, SEQ ID NO:452, SEQ ID NO:453, SEQ ID NO: 454, SEQ ID NO: 484, SEQ ID NO: 485, SEQ ID NO: 486, SEQ ID NO: 526, SEQ ID NO: 527, SEQ ID NO: 528, SEQ ID NO: 603, SEQ ID NO: 604, SEQ ID NO: 605, SEQ ID NO: 633, SEQ ID NO: 634, SEQ ID NO: 635, SEQ ID NO: 691, SEQ ID NO: 692, SEQ ID NO: 693, SEQ ID NO: 715, SEQ ID NO: 716, SEQ ID NO: 717, SEQ ID NO: 741, SEQ ID NO: 742, SEQ ID NO: 743, SEQ ID NO: 759, SEQ ID NO: 760, SEQ ID NO: 761, SEQ ID NO: 763, SEQ ID NO: 764, SEQ ID NO: 765, SEQ ID NO: 822, SEQ ID NO: 823, SEQ ID NO: 824, SEQ ID NO: 826, SEQ ID NO: 827, SEQ ID NO: 828, SEQ ID NO: 866, SEQ ID NO: 867 or SEQ ID NO: 868. In a preferred aspect of this alternative, the binding agent preferably anneals or hybridizes to an adaptor sequence which is attached, preferably by ligation, to the polynucleotide fusion sequence. Such an adaptor, preferably comprising a barcode or tag, is attached to the polynucleotide fusion which enables detection of said fusion after amplification. Additionally or alternatively, the binding agent comprises a gene-specific primer, a primer pair, or probe, any of which binds to a nucleotide sequence which is located 5′ or 3′ from a fusion breakpoint to allow amplification of the junction of NRG1 with VAPB, CADM1, CD44, SLC3A2, VTCN1, CDH1, CXADR, GTF2E2, CSMD1, PTN, ST14, THBS1, AGRN, PVALB, APP, WRN, DAAM1, ASPH, NOTCH2, CD74, SDC4, SLC4A4, ZFAT or DSCAML1.

[0739] Also, the testing for the presence of any polynucleotide fusion of the present disclosure preferably comprises amplification of a polynucleotide carrying an NRG1 fusion, or a portion thereof, preferably using a DNA polymerase, more preferably a thermostable DNA polymerase or Taq polymerase.

[0740] Preferably, the binding agent comprises a first and a second primer for amplifying a nucleotide sequence comprising an NRG1 sequence and a VAPB, CADM1, CD44, SLC3A2, VTCN1, CDH1, CXADR, GTF2E2, CSMD1, PTN, ST14, THBS1, AGRN, PVALB, APP, WRN, DAAM1, ASPH, NOTCH2, CD74, SDC4, SLC4A4, ZFAT or DSCAML1 sequence to detect any polynucleotide fusions mentioned herein. More preferably, provided is a first primer hybridizing or annealing to a nucleotide sequence specific for the NRG1 sequence part of the fusion and a second primer hybridizing or annealing to a nucleotide sequence specific for a fusion partner selected from VAPB, CADM1, CD44, SLC3A2, VTCN1, CDH1, CXADR, GTF2E2, CSMD1, PTN, ST14, THBS1, AGRN, PVALB APP, WRN, DAAM1, ASPH, NOTCH2, CD74, SDC4, SLC4A4, ZFAT or DSCAML1. Preferably, the first and second primers bind in close proximity to a fusion junction to amplify a sequence comprising a part of the NRG1 sequence and a part of the sequence of VAPB, CADM1, CD44, SLC3A2, VTCN1, CDH1, CXADR, GTF2E2, CSMD1, PTN, ST14, THBS1, AGRN, PVALB, APP, WRN, DAAM1, ASPH, NOTCH2, CD74, SDC4, SLC4A4, ZFAT or DSCAML1. The first or second primer may also bind a position spanning the fusion junction. Typically, the amplified sequence comprises up to a 1000, 900, 800, 700, 600, 500, 400, or 300 base pairs. Typically, the amplified sequence spans the NRG1 fusion junction.

[0741] Also provided is thus a binding agent which is or comprises a nucleic acid probe or primer of 10-40 nucleotides in length for detection of a polynucleotide fusion of VAPB, CADM1, CD44, SLC3A2, VTCN1, CDH1, CXADR, GTF2E2, CSMD1, PTN, ST14, THBS1, AGRN, PVALB, APP, WRN, DAAM1, ASPH, NOTCH2, CD74, SDC4, SLC4A4, ZFAT or DSCAML1 with NRG1 of the present disclosure, wherein the fusion comprises the nucleic acids at position 43 and 44 of SEQ ID NO: 3, the nucleic acids at position 53 and 54 of SEQ ID NO: 7, the nucleic acids at position 52 and 53 of SEQ ID NO: 11, the nucleic acids at position 53 and 54 of SEQ ID NO: 15, the nucleic acids at position 65 and 66 of SEQ ID NO: 166, the nucleic acids at position 119 and 120 of SEQ ID NO: 186, the nucleic acids at position 43 and 44 of SEQ ID NO: 217, the nucleic acid at position 141 and 142 of SEQ ID NO: 233, the nucleic acids at position 88 and 89 of SEQ ID NO: 255, the nucleic acids at position 102 and 103 of SEQ ID NO: 313, the nucleic acids at position 95 and 96 of SEQ ID NO: 330, the nucleic acids at position 56 and 57 of SEQ ID NO: 376, the nucleic acids at position 106 and 107 of SEQ ID NO: 403, the nucleic acids at position 102 and 103 of SEQ ID NO: 437 or the nucleic acids at position 93 and 94 of SEQ ID NO: 454, the nucleic acids at position 54 and 55 of SEQ ID NO: 486, the nucleic acids at position 96 and 97 of SEQ ID NO: 528, the nucleic acids at position 75 and 76 of SEQ ID NO: 605, the nucleic acids at position 75 and 76 of SEQ ID NO: 635, the nucleic acids at position 75 and 76 of SEQ ID NO: 693, the nucleic acids at position 75 and 76 of SEQ ID NO: 717, the nucleic acids at position 75 and 76 of SEQ ID NO: 743, the nucleic acids at position 75 and 76 of SEQ ID NO: 761, the nucleic acids at position 75 and 76 of SEQ ID NO: 765, the nucleic acids at position 75 and 76 of SEQ ID NO: 824, the nucleic acids at position 75 and 76 of SEQ ID NO: 828, the nucleic acids at position 75 and 76 of SEQ ID NO: 868, respectively. The nucleic acids of these positions define the break point or fusion junction between NRG1 and its fusions partner.

[0742] Preferably, said testing as mentioned herein comprises amplifying or detecting a sequence that discriminates between the presence and absence of the polynucleotide fusion, or polypeptide encoded therefrom.

[0743] In a preferred embodiment, the binding agent is a polypeptide and detecting the presence thereof is preferably by flow-cytometry (FC), fluorescence in situ hybridization (FISH), immunocytochemistry (ICC), immuno histochemistry (IHC) or immunofluorescence (IF). Various techniques are available for the skilled person to detect an NRG1 fusion of the present disclosure in a sample using FC, IHC, FISH, ICC or IF. For instance, ICC can be performed by using a first antibody targeting NRG1 and a second antibody targeting an NRG1 fusion partner selected from VAPB, CADM1, CD44, SLC3A2, VTCN1, CDH1, CXADR, GTF2E2, CSMD1, PTN, ST14, THBS1, AGRN, PVALB, APP, WRN, DAAM1, ASPH, NOTCH2, CD74, SDC4, SLC4A4, ZFAT or DSCAML1. Co-localization of the signal of the first and second antibody or detecting the presence of a polypeptide product of the expected size using a protein size-based discrimination assay reveals the presence of the respective NRG1 fusion product. Preferably, the anti-NRG1 antibody targets the EGF-like domain of NRG1 and the second antibody targets an extracellular domain of the fusion partner, such as VAPB, CADM1, CD44, SLC3A2, VTCN1, CDH1, CXADR, GTF2E2, CSMD1, PTN, ST14, THBS1, AGRN, PVALB, APP, WRN, DAAM1, ASPH, NOTCH2, CD74, SDC4, SLC4A4, ZFAT or DSCAML1. One example of a FISH protocol is provided by Frithiof et al. in OncoTargets and therapy vol. 9, 7095-7103, 16 Nov. 2016. In addition, antibodies can be detected using two different fluorescence detection systems in combination with the use of two different channels in a fluorescence microscope. Results are interpreted based on the overlapping or non-overlapping appearance of the two fluorescence signals. It lies well within the ambit of the skilled person to develop antibodies against polypeptides of known structure and sequence.

[0744] Preferably, the polynucleotide or polypeptide fusion to be detected is obtained from an aberrant cell that expresses an NRG1 EGF-like domain comprising polynucleotide fusion. Preferably, any detection method of the present disclosure comprises a step of obtaining the sample from a subject, followed by a step of isolating the polynucleotide or polypeptide encoded therefrom, from the sample. Also, said method preferably comprises a step of purifying or isolating the polynucleotide or polypeptide from the sample.

[0745] Preferably, the sample is obtained from a subject suffering from, or suspect of suffering from, having an aberrant cell, a cancer or a tumor. The sample may be a liquid biopsy sample or a sample taken from a solid cancer or a solid tumor. The solid sample preferably is a formalin embedded paraffin fixed sample containing any one of aberrant cells, a section of a cancer or of a tumor. Taking a biopsy from a solid cancer or solid tumor involves impactful disruption of the physical integrity of the skin, and possibly internal organs, to reach the tumor under investigation. Using liquid biopsy, such as selected from blood, blood serum, blood plasma, pleural effusion, saliva, urine, semen, sputum, vaginal fluid, amniotic fluid, peritoneal fluid, cerebrospinal fluid, bone marrow, cell free lavage or another biofluid, allows for more affordable, quick, reliable and less invasive sampling over such methods. Thus, preferably, the sample is a liquid biopsy sample.

### Antibody-Based Assays for Detecting or Identifying NRG1 Fusions

[0746] Also provided is a polypeptide-based detection assay and antibodies for use therein. The detection assay aims to detect any polypeptide NRG1 fusion of the disclosure, in particular a VAPB-NRG1, CADM1-NRG1, CD44-NRG1, SLC3A2-NRG1, VTCN1-NRG1, CDH1-NRG1, CXADR-NRG1, GTF2E2-NRG1, CSMD1-NRG1, PTN-NRG1, ST14-NRG1, THBS1-NRG1, AGRN-NRG1, PVALB-NRG1, APP-NRG1, WRN-NRG1, ASPH-NRG1, NOTCH2-NRG1, CD74-NRG1, SDC4-NRG1, SLC4A4-NRG1, ZFAT-NRG1 and DSCAML1-NRG1 fusion of the disclosure.

[0747] In particular is provided, a first antibody, or a set of a first and a second antibody, suitable for detection of any polypeptide fusion as mentioned herein, preferably any polypeptide fusion encoded by any polynucleotide fusion as mentioned herein. It lies well within the abilities of the skilled person to design, develop and produce antibodies that are capable of and suitable for specific binding to polypeptide fusions as disclosed herein.

[0748] In case a first antibody is used without the second antibody, the first antibody specifically detects an epitope that is unique for the NRG1 polypeptide fusion. Such an epitope includes an epitope that spans the polypeptide fusion between NRG1 and its fusion partner. Alternatively, in case a first antibody is used without the second antibody, and the first antibody is used in a detection assay, such as discussed further below, said assay includes a step to distinguish from a non-fused polypeptide (e.g. a separation step based on size or charge, such as CIEX or HPLC). In case a first and second antibody is used, the first antibody detects one part of the polypeptide fusion (i.e. VAPB, CADM1, CD44, SLC3A2, VTCN1, CDH1, CXADR, GTF2E2, CSMD1, PTN, ST14, THBS1, AGRN, PVALB, APP, WRN, ASPH, NOTCH2, CD74, SDC4, SLC4A4, ZFAT or DSCAML1) and the second antibody detects the NRG1-comprising part of the polypeptide fusion.

[0749] More in particular, the present disclosure provides a first antibody, or a set of a first and a second antibody, for detection of a polypeptide encoded by a polynucleotide fusion comprising a nucleic acid encoding a protein sequence of VAPB, or an allelic variant of VAPB, fused with a nucleic acid encoding a protein sequence of NRG1, or an allelic variant of NRG1.

[0750] Preferably, the first antibody, or set of a first and a second antibody, is for detection of a polypeptide fusion comprising a portion of the polypeptide encoded by exon 1 of VAPB, or an allelic variant of exon 1, fused with a portion of the polypeptide encoded by exon 2 of NRG1, or an allelic variant of exon 2. Also provided is a detection assay comprising a first antibody or a set of a first and second antibodies for detection of the presence of a polypeptide encoded by a polynucleotide fusion involving VAPB and NRG1, wherein the first antibody preferably binds the VAPB-NRG1 polypeptide fusion and the set of first and second antibodies preferably binds VAPB and NRG1.

[0751] Also provided is a first antibody, or a set of a first and a second antibody, for detection of a polypeptide fusion comprising a portion of the polypeptide encoded by exon 7 of CADM1, or an allelic variant of exon 7, fused with a portion of the polypeptide encoded by of exon 6 of NRG1, or an allelic variant of exon 6. Also provided is a detection assay comprising a first antibody or a set of a first and second antibodies for detection of the presence of a polypeptide fusion comprising a portion of the polypeptide encoded by of exon 7 of CADM1, or an allelic variant of exon 7, fused with a portion of the polypeptide encoded by of exon 6 of NRG1, or an allelic variant of exon 6 wherein the first antibody preferably binds the CADM1-NRG1 polypeptide fusion and the set of first and second antibodies preferably binds CADM1 and NRG1, respectively.

[0752] Also provided is a first antibody or a set of a first and a second antibody pair for detection of a polypeptide fusion comprising a portion of the polypeptide encoded by exon 5 of CD44, or an allelic variant of exon 5, fused with a portion of the polypeptide encoded by exon 2 of NRG1, or an allelic variant of exon 2. Also provided is a detection assay comprising a first antibody or a set of a first and second antibodies for detection of the presence of a polypeptide fusion comprising a portion of the polypeptide encoded by exon 5 of CD44, or an allelic variant of exon 5, fused with a portion of the polypeptide encoded by exon 2 of NRG1, or an allelic variant of exon 2, wherein the first antibody preferably binds the CD44-NRG1 polypeptide fusion and the set of first and second antibodies preferably binds CD44 and NRG1, respectively.

[0753] Also provided is a first antibody, or a set of a first and a second antibody, for detection of a polypeptide fusion comprising a portion of the polypeptide encoded by exon 5 of CD44, or an allelic variant of exon 5, fused with a portion of the polypeptide encoded by of exon 6 of NRG1, or an allelic variant of exon 6. Also provided is a detection assay comprising a first antibody or a set of a first and second antibodies for detection of the presence of a polypeptide fusion comprising a portion of the polypeptide encoded by of exon 5 of CD44, or an allelic variant of exon 5, fused with a portion of the polypeptide encoded by of exon 6 of NRG1, or an allelic variant of exon 6 wherein the first antibody preferably binds the CD44-NRG1 polypeptide fusion and the set of first and second antibodies preferably binds CD44 and NRG1, respectively.

[0754] Also provided is a first antibody or a set of a first and a second antibody for detection of a polypeptide fusion comprising a portion of the polypeptide encoded by exon 1 of transcript version 6 of SLC3A2, or an allelic variant of exon 1, fused with a portion of the polypeptide encoded by exon 5 of NRG1, or an allelic variant of exon 5. Also provided is a detection assay comprising a first antibody or a set of a first and second antibodies for detection of the presence of a polypeptide comprising a portion of the polypeptide encoded by exon 1 of said SLC3A2, or an allelic variant of exon 1, fused with a portion of the polypeptide encoded by exon 5 of NRG1, or an allelic variant of exon 5, wherein the first antibody preferably binds the SLC3A2-NRG1 polypeptide fusion of SLC3A2 transcript version 6 and the set of first and second antibodies preferably binds said SLC3A2 and NRG1, respectively.

[0755] Also provided is a first antibody or a set of a first and a second antibody pair for detection of a polypeptide fusion comprising a portion of the polypeptide encoded by exon 2 of VTCN1, or an allelic variant of exon 2, fused with a portion of the polypeptide encoded by exon 2 of NRG1, or an allelic variant of exon 2. Also provided is a detection assay comprising a first antibody or a set of a first and second antibodies for detection of the presence of a polypeptide fusion comprising a portion of the polypeptide encoded by exon 2 of VTCN1, or an allelic variant of exon 2, fused with a portion of the polypeptide encoded by exon 2 of NRG1, or an allelic variant of exon 2, wherein the first antibody preferably binds the VTCN1-NRG1 polypeptide fusion and the set of first and second antibodies preferably binds VTCN1 and NRG1, respectively.

[0756] Also provided is a first antibody or a set of a first and a second antibody pair for detection of a polypeptide fusion comprising a portion of the polypeptide encoded by exon 11 of CDH1, or an allelic variant of exon 11, fused with a portion of the polypeptide encoded by exon 2 of NRG1, or an allelic variant of exon 2. Also provided is a detection assay comprising a first antibody or a set of a first and second antibodies for detection of the presence of a polypeptide fusion comprising a portion of the polypeptide encoded by exon 11 of CDH1, or an allelic variant of exon 11, fused with a portion of the polypeptide encoded by exon 2 of NRG1, or an allelic variant of exon 2, wherein the first antibody preferably binds the CDH1-NRG1 polypeptide fusion and the set of first and second antibodies preferably binds CDH1 and NRG1, respectively.

[0757] Also provided is a first antibody or a set of a first and a second antibody pair for detection of a polypeptide fusion comprising a portion of the polypeptide encoded by exon 1 of CXADR, or an allelic variant of exon 1, fused with a portion of the polypeptide encoded by exon 2 of NRG1, or an allelic variant of exon 2. Also provided is a detection assay comprising a first antibody or a set of a first and second antibodies for detection of the presence of a polypeptide fusion comprising a portion of the polypeptide encoded by exon 1 of CXADR, or an allelic variant of exon 1, fused with a portion of the polypeptide encoded by exon 2 of NRG1, or an allelic variant of exon 2, wherein the first antibody preferably binds the CXADR-NRG1 polypeptide fusion and the set of first and second antibodies preferably binds CXADR and NRG1, respectively.

[0758] Also provided is a first antibody or a set of a first and a second antibody pair for detection of a polypeptide fusion comprising a portion of the polypeptide encoded by exon 2 of GFT2E2, or an allelic variant of exon 2, fused with a portion of the polypeptide encoded by exon 2 of NRG1, or an allelic variant of exon 2. Also provided is a detection assay comprising a first antibody or a set of a first and second antibodies for detection of the presence of a polypeptide fusion comprising a portion of the polypeptide encoded by exon 2 of GFT2E2, or an allelic variant of exon 2, fused with a portion of the polypeptide encoded by exon 2 of NRG1, or an allelic variant of exon 2, wherein the first antibody preferably binds the GFT2E2-NRG1 polypeptide fusion and the set of first and second antibodies preferably binds GFT2E2 and NRG1, respectively.

[0759] Also provided is a first antibody or a set of a first and a second antibody pair for detection of a polypeptide fusion comprising a portion of the polypeptide encoded by exon 23 of CSMD1, or an allelic variant of exon 23, fused with a portion of the polypeptide encoded by exon 6 of NRG1, or an allelic variant of exon 6. Also provided is a detection assay comprising a first antibody or a set of a first and second antibodies for detection of the presence of a polypeptide fusion comprising a portion of the polypeptide encoded by exon 23 of CSMD1, or an allelic variant of exon 23, fused with a portion of the polypeptide encoded by exon 6 of NRG1, or an allelic variant of exon 6, wherein the first antibody preferably binds the CSMD1-NRG1 polypeptide fusion and the set of first and second antibodies preferably binds CSMD1 and NRG1, respectively.

[0760] Also provided is a first antibody or a set of a first and a second antibody pair for detection of a polypeptide fusion comprising a portion of the polypeptide encoded by exon 4 of PTN, or an allelic variant of exon 4, fused with a portion of the polypeptide encoded by exon 2 of NRG1, or an allelic variant of exon 2. Also provided is a detection assay comprising a first antibody or a set of a first and second antibodies for detection of the presence of a polypeptide fusion comprising a portion of the polypeptide encoded by exon 4 of PTN, or an allelic variant of exon 4, fused with a portion of the polypeptide encoded by exon 2 of NRG1, or an allelic variant of exon 2, wherein the first antibody preferably binds the PTN-NRG1 polypeptide fusion and the set of first and second antibodies preferably binds PTN and NRG1, respectively.

[0761] Also provided is a first antibody or a set of a first and a second antibody pair for detection of a polypeptide fusion comprising a portion of the polypeptide encoded by exon 11 of ST14, or an allelic variant of exon 11, fused with a portion of the polypeptide encoded by exon 6 of NRG1, or an allelic variant of exon 6. Also provided is a detection assay comprising a first antibody or a set of a first and second antibodies for detection of the presence of a polypeptide fusion comprising a portion of the polypeptide encoded by exon 11 of ST14, or an allelic variant of exon 11, fused with a portion of the polypeptide encoded by exon 6 of NRG1, or an allelic variant of exon 6, wherein the first antibody preferably binds the ST14-NRG1 polypeptide fusion and the set of first and second antibodies preferably binds ST14 and NRG1, respectively.

[0762] Also provided is a first antibody or a set of a first and a second antibody pair for detection of a polypeptide fusion comprising a portion of the polypeptide encoded by exon 9 of THBS1, or an allelic variant of exon 9, fused with a portion of the polypeptide encoded by exon 6 of NRG1, or an allelic variant of exon 6. Also provided is a detection assay comprising a first antibody or a set of a first and second antibodies for detection of the presence of a polypeptide fusion comprising a portion of the polypeptide encoded by exon 9 of THBS1, or an allelic variant of exon 9, fused with a portion of the polypeptide encoded by exon 6 of NRG1, or an allelic variant of exon 6, wherein the first antibody preferably binds the THBS1-NRG1 polypeptide fusion and the set of first and second antibodies preferably binds THBS1 and NRG1, respectively.

[0763] Also provided is a first antibody or a set of a first and a second antibody pair for detection of a polypeptide fusion comprising a portion of the polypeptide encoded by exon 12 of AGRN, or an allelic variant of exon 12, fused with a portion of the polypeptide encoded by exon 6 of NRG1, or an allelic variant of exon 6. Also provided is a detection assay comprising a first antibody or a set of a first and second antibodies for detection of the presence of a polypeptide fusion comprising a portion of the polypeptide encoded by exon 12 of AGRN, or an allelic variant of exon 12, fused with a portion of the polypeptide encoded by exon 6 of NRG1, or an allelic variant of exon 6, wherein the first antibody preferably binds the AGRN-NRG1 polypeptide fusion and the set of first and second antibodies preferably binds AGRN and NRG1, respectively.

[0764] Also provided is a first antibody or a set of a first and a second antibody pair for detection of a polypeptide fusion comprising a portion of the polypeptide encoded by exon 4 of PVALB, or an allelic variant of exon 4, fused with a portion of the polypeptide encoded by exon 6 of NRG1, or an allelic variant of exon 6. Also provided is a detection assay comprising a first antibody or a set of a first and second antibodies for detection of the presence of a polypeptide fusion comprising a portion of the polypeptide encoded by exon 4 of PVALB, or an allelic variant of exon 4, fused with a portion of the polypeptide encoded by exon 6 of NRG1, or an allelic variant of exon 6, wherein the first antibody preferably binds the PVALB-NRG1 polypeptide fusion and the set of first and second antibodies preferably binds PVALB and NRG1, respectively.

[0765] Also provided is a first antibody or a set of a first and a second antibody pair for detection of a polypeptide fusion comprising a portion of the polypeptide encoded by exon 2 of transcript version 3 of SLC3A2, or an allelic variant of exon 2, fused with a portion of the polypeptide encoded by exon 6 of NRG1, or an allelic variant of exon 6. Also provided is a detection assay comprising a first antibody or a set of a first and second antibodies for detection of the presence of a polypeptide fusion comprising a portion of the polypeptide encoded by exon 2 of said SLC3A2, or an allelic variant of exon 2, fused with a portion of the polypeptide encoded by exon 6 of NRG1, or an allelic variant of exon 6, wherein the first antibody preferably binds the SLC3A2-NRG1 polypeptide fusion of transcript version 3 and the set of first and second antibodies preferably binds said SLC3A2 and NRG1, respectively.

[0766] Also provided is a first antibody, or a set of a first and a second antibody, for detection of a polypeptide fusion comprising a portion of the polypeptide encoded by exon 14 of APP, or an allelic variant of exon 14, fused with a portion of the polypeptide encoded by of exon 6 of NRG1, or an allelic variant of exon 6. Also provided is a detection assay comprising a first antibody or a set of a first and second antibodies for detection of the presence of a polypeptide fusion comprising a portion of the polypeptide encoded by of exon 14 of APP, or an allelic variant of exon 14, fused with a portion of the polypeptide encoded by of exon 6 of NRG1, or an allelic variant of exon 6 wherein the first antibody preferably binds the APP-NRG1 polypeptide fusion and the set of first and second antibodies preferably binds APP and NRG1, respectively.

[0767] Also provided is a first antibody, or a set of a first and a second antibody, for detection of a polypeptide fusion comprising a portion of the polypeptide encoded by exon 33 of WRN, or an allelic variant of exon 33, fused with a portion of the polypeptide encoded by of exon 6 of NRG1, or an allelic variant of exon 6. Also provided is a detection assay comprising a first antibody or a set of a first and second antibodies for detection of the presence of a polypeptide fusion comprising a portion of the polypeptide encoded by of exon 33 of WRN, or an allelic variant of exon 33, fused with a portion of the polypeptide encoded by of exon 6 of NRG1, or an allelic variant of exon 6 wherein the first antibody preferably binds the WRN-NRG1 polypeptide fusion and the set of first and second antibodies preferably binds WRN and NRG1, respectively.

[0768] The present disclosure also provides a first antibody, or a set of a first and a second antibody, for detection of a polypeptide encoded by a polynucleotide fusion comprising a nucleic acid encoding a protein sequence of ASPH, or an allelic variant of ASPH, fused with a nucleic acid encoding a protein sequence of NRG1, or an allelic variant of NRG1.

[0769] More in particular is provided a first antibody, or a set of a first and a second antibody, for detection of a polypeptide fusion comprising a portion of the polypeptide encoded by exon 22 of ASPH, or an allelic variant of exon 22, fused with a portion of the polypeptide encoded by of exon 2 of NRG1, or an allelic variant of exon 2. Also provided is a detection assay comprising a first antibody or a set of a first and second antibodies for detection of the presence of a polypeptide fusion comprising a portion of the polypeptide encoded by of exon 22 of ASPH, or an allelic variant of exon 22, fused with a portion of the polypeptide encoded by of exon 2 of NRG1, or an allelic variant of exon 2 wherein the first antibody preferably binds the ASPH-NRG1 polypeptide fusion and the set of first and second antibodies preferably binds ASPH and NRG1, respectively.

[0770] Also provided is a first antibody, or a set of a first and a second antibody, for detection of a polypeptide fusion comprising a portion of the polypeptide encoded by exon 6 of NOTCH2, or an allelic variant of exon 6, fused with a portion of the polypeptide encoded by of exon 6 of NRG1, or an allelic variant of exon 6. Also provided is a detection assay comprising a first antibody or a set of a first and second antibodies for detection of the presence of a polypeptide fusion comprising a portion of the polypeptide encoded by of exon 6 of NOTCH2, or an allelic variant of exon 6, fused with a portion of the polypeptide encoded by of exon 6 of NRG1, or an allelic variant of exon 6 wherein the first antibody preferably binds the NOTCH2-NRG1 polypeptide fusion and the set of first and second antibodies preferably binds NOTCH2 and NRG1, respectively.

[0771] Also provided is a first antibody, or a set of a first and a second antibody, for detection of a polypeptide fusion comprising a portion of the polypeptide encoded by exon 2 of CD74, or an allelic variant of exon 2, fused with a portion of the polypeptide encoded by of exon 2 of NRG1, or an allelic variant of exon 2. Also provided is a detection assay comprising a first antibody or a set of a first and second antibodies for detection of the presence of a polypeptide fusion comprising a portion of the polypeptide encoded by of exon 2 of CD74, or an allelic variant of exon 2, fused with a portion of the polypeptide encoded by of exon 2 of NRG1, or an allelic variant of exon 2 wherein the first antibody preferably binds the CD74-NRG1 polypeptide fusion and the set of first and second antibodies preferably binds CD74 and NRG1, respectively.

[0772] Also provided is a first antibody, or a set of a first and a second antibody, for detection of a polypeptide fusion comprising a portion of the polypeptide encoded by exon 2 of SDC4, or an allelic variant of exon 2, fused with a portion of the polypeptide encoded by of exon 2 of NRG1, or an allelic variant of exon 2. Also provided is a detection assay comprising a first antibody or a set of a first and second antibodies for detection of the presence of a polypeptide fusion comprising a portion of the polypeptide encoded by of exon 2 of SDC4, or an allelic variant of exon 2, fused with a portion of the polypeptide encoded by of exon 2 of NRG1, or an allelic variant of exon 2 wherein the first antibody preferably binds the SDC4-NRG1 polypeptide fusion and the set of first and second antibodies preferably binds SDC4 and NRG1, respectively.

[0773] Also provided is a first antibody, or a set of a first and a second antibody, for detection of a polypeptide fusion comprising a portion of the polypeptide encoded by exon 4 of SDC4, or an allelic variant of exon 4, fused with a portion of the polypeptide encoded by of exon 2 of NRG1, or an allelic variant of exon 2. Also provided is a detection assay comprising a first antibody or a set of a first and second antibodies for detection of the presence of a polypeptide fusion comprising a portion of the polypeptide encoded by of exon 4 of SDC4, or an allelic variant of exon 4, fused with a portion of the polypeptide encoded by of exon 2 of NRG1, or an allelic variant of exon 2 wherein the first antibody preferably binds the SDC4-NRG1 polypeptide fusion and the set of first and second antibodies preferably binds SDC4 and NRG1, respectively.

[0774] Also provided is a first antibody, or a set of a first and a second antibody, for detection of a polypeptide fusion comprising a portion of the polypeptide encoded by exon 14 of SLC4A4, or an allelic variant of exon 14, fused with a portion of the polypeptide encoded by of exon 6 of NRG1, or an allelic variant of exon 6. Also provided is a detection assay comprising a first antibody or a set of a first and second antibodies for detection of the presence of a polypeptide fusion comprising a portion of the polypeptide encoded by of exon 14 of SLC4A4, or an allelic variant of exon 14, fused with a portion of the polypeptide encoded by of exon 6 of NRG1, or an allelic variant of exon 6 wherein the first antibody preferably binds the SLC4A4-NRG1 polypeptide fusion and the set of first and second antibodies preferably binds SLC4A4 and NRG1, respectively.

[0775] The present disclosure also provides a first antibody, or a set of a first and a second antibody, for detection of a polypeptide encoded by a polynucleotide fusion comprising a nucleic acid encoding a protein sequence of ZFAT, or an allelic variant of ZFAT, fused with a nucleic acid encoding a protein sequence of NRG1, or an allelic variant of NRG1.

[0776] More in particular is provided a first antibody, or a set of a first and a second antibody, for detection of a polypeptide fusion comprising a portion of the polypeptide encoded by exon 12 of ZFAT, or an allelic variant of exon 12, fused with a portion of the polypeptide encoded by of exon 6 of NRG1, or an allelic variant of exon 6. Also provided is a detection assay comprising a first antibody or a set of a first and second antibodies for detection of the presence of a polypeptide fusion comprising a portion of the polypeptide encoded by of exon 12 of ZFAT, or an allelic variant of exon 12, fused with a portion of the polypeptide encoded by of exon 6 of NRG1, or an allelic variant of exon 6 wherein the first antibody preferably binds the ZFAT-NRG1 polypeptide fusion and the set of first and second antibodies preferably binds ZFAT and NRG1, respectively.

[0777] The present disclosure also provides a first antibody, or a set of a first and a second antibody, for detection of a polypeptide encoded by a polynucleotide fusion comprising a nucleic acid encoding a protein sequence of DSCAML1, or an allelic variant of DSCAML1, fused with a nucleic acid encoding a protein sequence of NRG1, or an allelic variant of NRG1.

[0778] More in particular is provided a first antibody, or a set of a first and a second antibody, for detection of a polypeptide fusion comprising a portion of the polypeptide encoded by exon 3 of DSCAML1, or an allelic variant of exon 3, fused with a portion of the polypeptide encoded by of exon 2 of NRG1, or an allelic variant of exon 2. Also provided is a detection assay comprising a first antibody or a set of a first and second antibodies for detection of the presence of a polypeptide fusion comprising a portion of the polypeptide encoded by of exon 3 of DSCAML1, or an allelic variant of exon 3, fused with a portion of the polypeptide encoded by of exon 2 of NRG1, or an allelic variant of exon 2 wherein the first antibody preferably binds the DSCAML1-NRG1 polypeptide fusion and the set of first and second antibodies preferably binds DSCAML1 and NRG1, respectively.

[0779] Preferably, the anti-NRG1 antibody preferably binds to the EGF-like domain of NRG1. Detection of the presence of an EGF-like domain in a polypeptide fusion of the present disclosure is advantageous since it shows the EGF-like domain is translated and thus part of an in-frame fusion with VAPB, CADM1, CD44, SLC3A2, VTCN1, CDH1, CXADR, GTF2E2, CSMD1, PTN, ST14, THBS1, AGRN, PVALB, APP, WRN, ASPH, NOTCH2, CD74, SDC4, SLC4A4, ZFAT or DSCAML1 as a fusion partner.

[0780] The herein mentioned antibodies against NRG1, VAPB, CADM1, CD44, SLC3A2, VTCN1, CDH1, CXADR, GTF2E2, CSMD1, PTN, ST14, THBS1, AGRN, PVALB, APP, WRN, ASPH, NOTCH2, CD74, SDC4, SLC4A4, ZFAT or DSCAML1 can be used in flow-cytometry (FC), fluorescence in situ hybridization (FISH), immunocytochemistry (ICC), immuno histochemistry (IHC) or immunofluorescence (IF).

### Methods of Treatment

[0781] The fusions of the present disclosure are present or have been identified in human patients having aberrant cells, in particular patient that have been diagnosed with cancer. The cancer of the present disclosure in particular is a pancreatic cancer, more in particular a pancreatic ductal adenocarcinoma, a sarcoma, a bladder cancer, a colon cancer, a rectal cancer, a colorectal cancer, a gallbladder cancer, a head and neck cancer, a prostate cancer, a uterus cancer, a breast cancer, an ovarian cancer, a liver cancer, an endometrial cancer, a lung cancer, in particular a non-small cell lung cancer or an invasive mucinous adenocarcinoma.

[0782] In general terms, the present disclosure also provides methods of treatment of subjects having an aberrant cell, like a cancer, a tumor, wherein said cancer, tumor or aberrant cell, which cell, cancer or tumor comprises an NRG1 polynucleotide fusion of the present disclosure or expresses an NRG1 polypeptide fusion according to the present disclosure.

[0783] The present NRG1 fusions have been identified as part of a clinical trial referred to as the eNRGy study and the Early Access Program (NCT02912949 and NCT04100694, respectively). As of the cut-off date of Apr. 12, 2022, a total of about 70 percent of enrolled, non-excluded patients with an identified NRG1 fusion, exhibited investigator-assessed responses observed according to RECIST 1.1 criteria across fusion partners and in multiple different cancer types. Investigator-assessed responses were observed in each category of Table 1. The indications for which responses were observed include pancreatic ductal adenocarcinoma, non-small cell lung cancer, breast cancer and cholangiocarcinoma.

### Prevalence of NRG1 Fusion Partners

TABLE 1
overview of the percentage of NRG1 fusion partners found expressed as
percentage of the indicated fusion partner from the total number of
fusions identified in individuals in clinical trial NCT02912949 with cut-off
of Apr. 12^{th}, 2022. Other comprises NRG1 fusions identified at less
than 2% of the total identified as of the cut-off date.

| NRG1 fusion partner category | Percentage of total |
|---|---|
| CD74 | 31% |
| SLC3A2 | 16% |
| SDC4 | 9% |
| RBPMS | 4% |
| CDH1 | 2% |
| VTCN1 | 2% |
| Others | 23% |

[0784] Preferably, the aberrant cell, cancer (or cancer cell) or tumor (or tumor cell) comprises a polynucleotide fusion of the present disclosure which further comprises an in-frame fusion of a coding sequence that codes for EGF-like domain of NRG1.

[0785] The disclosure also provides a method of treating a subject having an ErbB-2 and/or ErbB-3 positive aberrant cell, cancer cell or tumor cell that comprises an NRG1 polynucleotide fusion or expresses an NRG1 polypeptide fusion as mentioned herein, said method comprising detecting the presence of any polynucleotide or polypeptide fusion mentioned herein, followed by administering to the subject an effective amount of an ErbB-2 and/or ErbB-3 targeting agent, thereby treating the cancer in the subject. The presence of any one of the NRG1 fusions of the present disclosure, be it a polynucleotide or a polypeptide translated therefrom, is indicative of cancer.

[0786] Also provided is a method for inhibiting the progression in a subject of an ErbB-2 and ErbB-3 positive cancer that comprises an NRG1 polynucleotide fusion or expresses an NRG1 polypeptide fusion as mentioned herein, said method comprising detecting the presence of any polynucleotide or polypeptide fusion mentioned herein, followed by administering to the subject an effective amount of an ErbB-2 and/or ErbB-3 targeting agent.

[0787] Also provided is an ErbB-2 and/or ErbB-3 targeting agent for use in the treatment of a subject that has an ErbB-2 and ErbB-3 positive cancer that comprises an NRG1 polynucleotide fusion or expresses an NRG1 polypeptide fusion as mentioned herein, said treatment comprising detecting the presence of any polynucleotide or polypeptide fusion mentioned herein, followed by administering an effective amount of the ErbB-2 and/or ErbB-3 targeting agent to the subject.

[0788] Also provided is an ErbB-2 and/or ErbB-3 targeting agent for use in the manufacture of a medicament for the treatment of a subject that carries an ErbB-2 and ErbB-3 positive cancer that comprises an NRG1 polynucleotide fusion or expresses an NRG1 polypeptide fusion as mentioned herein, said treatment comprising detecting the presence of any polynucleotide or polypeptide fusion mentioned herein, followed by administering an effective amount of the ErbB-2 and/or ErbB-3 targeting agent to the subject.

[0789] Furthermore provided is a method for assessing whether a subject suffers from a cancer or is prone to suffering from a cancer, the method comprising testing a sample obtained from a subject to detect the presence of an NRG1 polynucleotide fusion or an NRG1 polypeptide fusion as mentioned herein in the sample, and assessing that said subject suffers from said cancer or is prone to suffering therefrom, by identifying the presence of said fusion. The testing preferably comprises detecting the fusion by utilizing a binding agent that specifically binds said polynucleotide or utilizing a binding agent that binds a polynucleotide that comprises said polynucleotide fusion. More details on a binding agent that binds a polynucleotide that comprises said polynucleotide fusion are given below herein.

[0790] Preferably, the method of diagnosis as mentioned herein comprises the step of associating the detection of an NRG1 fusion in the sample with a cancer expressing an NRG1 polypeptide as mentioned herein to diagnose the subject as having a cancer expressing said NRG1 polypeptide fusion. Detection of the NRG1 fusion molecule, allows to identify a subject as having a cancer that expresses the NRG1 fusion polypeptide and to diagnose said subject with such a cancer. Having knowledge about the underlying oncogenic driver of a cancer allows improved or better tailored treatment to be selected and prescribed. Thus, detection in a sample from a subject of fusion molecules, such as fusion polypeptides or polynucleotides, allows to improve the chances of survival of a subject having an NRG1 associated cancer.

[0791] The present disclosure thus provides a method to treat cancer. The cancer is preferably a recurrent cancer or a metastasized cancer. Recurrence typically refers to local recurrence and means that the cancer is in the same place as the original cancer or very close to it. A tumor is typically said to be a metastasized tumor when the tumor has migrated to lymph nodes or tissues near the original cancer or spread to more distant organs or tissues far from the original cancer. In such cases both indications can be used.

[0792] The cancer in particular is a pancreatic cancer, pancreatic adenocarcinoma, pancreatic ductal adenocarcinoma, sarcoma, bladder, colorectal, gallbladder, head and neck cancer, prostate, uterus, breast cancer, an ovarian cancer, a liver cancer, an endometrial cancer, a lung cancer such as non-small cell lung cancer, in particular a non-small cell lung cancer, more in particular invasive mucinous adenocarcinoma. Preferably, the tumor genome shows presence or absence of mutations in one or more genes selected from the group consisting of EGFR, KRAS, cKIT-BRCA1-2, MET, ROS, RET, ALK, preferably KRAS.

[0793] The present disclosure makes use of an ErbB-2 and/or ErbB-3 targeting agent for treatment of a cancer that expresses an NRG1 fusion polypeptide, wherein the cancer is preferably an ErbB-2 and/or ErbB-3 positive cancer. Said targeting agent is selected from the group consisting of a multispecific antibody comprising a first antigen-binding site that binds an extracellular part of ErbB-2 and a second antigen-binding site that binds an extracellular part of ErbB-3, a tyrosine kinase inhibitor of ErbB-2, a monospecific bivalent antibody comprising an antigen-binding site that bind an extracellular part of ErbB-2, a monospecific bivalent antibody comprising an antigen-binding site that bind an extracellular part of ErbB-3, or any combination thereof.

[0794] Also included for the treatment of a cancer is the administration of one or more compounds selected from the group consisting of an inhibitor of a component of the PI3Kinase pathway, an inhibitor of a component of the MAPK pathway, a microtubule disrupting drug, and an inhibitor of a histone deacetylase (HDAC). Said inhibitor preferably comprises a tyrosine kinase inhibitor, a PI3Ka inhibitor, an Akt inhibitor, an mTOR inhibitor or an Src inhibitor. Said tyrosine kinase inhibitor is preferably afatinib, lapatinib and/or neratinib. Said PI3Ka inhibitor is preferably BYL719. In one embodiment, said Akt inhibitor is MK-2206. In one preferred embodiment, said mTOR inhibitor is everolimus. In one preferred embodiment, said Src inhibitor is saracatinib. In one preferred embodiment, said microtubule disrupting drug is paclitaxel. In one preferred embodiment, said HDAC inhibitor is vorinostat. In one embodiment, said binding compound that is specific for ErbB 2 and ErbB 3 is MM 111.

[0795] The ErbB-2 targeting agent is preferably with a monospecific bivalent antibody comprising antigen-binding sites that bind an extracellular part of ErbB-2. Such antibody is preferably trastuzumab, pertuzumab, or trastuzumab-emtansine. The ErbB-2 targeted treatment is preferably an ErbB-2 TKI. The ErbB-2 TKI is preferably one or more of lapatinib, canertinib, neratinib, tucatinib (or irbinitinib), CP-724714, tarloxitinib, mubritinib, afatinib, varlitinib, and dacomitinib, preferably afatinib. An ErbB-2 TKI may also affect ErbB-1 signaling but is different from an ErbB-1 TKI in that it has significant activity on ErbB-2. The ErbB-3 targeted treatment is preferably with a monospecific bivalent antibody comprising antigen-binding sites that bind an extracellular part of ErbB-3. Such antibody is preferably patritumab, seribantumab, lumretuzumab, elgemtumab, GSK2849330, KTN3379 or AV-203.

[0796] Preferably, the monospecific bivalent antibody comprising antigen-binding sites that bind an extracellular part of ErbB-3 comprises patritumab, seribantumab, lumretuzumab, elgemtumab, GSK2849330, KTN3379 or AV-203.

[0797] The tyrosine kinase inhibitor is preferably afatinib, lapatinib and/or neratinib.

[0798] More preferably, the ErbB-2 and/or ErbB-3 targeting agent is a multispecific, or more preferably a bispecific antibody, comprising a first antigen-binding site that binds an extracellular part of ErbB-2 and a second antigen-binding site that binds an extracellular part of ErbB-3. In particular, said bispecific antibody is zenocutuzumab.

[0799] The antibody can preferably reduce a ligand-induced receptor function of ErbB-3 on a ErbB-2 and ErbB-3 positive cell. Also, the antibody can preferably reduce ligand-induced growth of an ErbB-2 and ErbB-3 positive cell. The antibody is preferably a multispecific or bispecific antibody comprising a first antigen-binding site that binds an extracellular part of ErbB-2 and a second antigen-binding site that binds an extracellular part of ErbB-3.

[0800] The subject is preferably a human subject. The subject is preferably a subject eligible for monoclonal antibody therapy using an ErbB-2 specific antibody such as trastuzumab. In a preferred embodiment the subject comprises a tumor/cancer, preferably an ErbB-2/ErbB-3 positive cancer, preferably a tumor/cancer with an ErbB-2 therapy resistant phenotype and/or a heregulin resistance phenotype, preferably a monoclonal antibody resistant phenotype. A tumor involving such phenotype can escape treatment with a current anti-HER2 regimen, such as (but not limited to) monoclonal antibody therapy against ErbB-2.

[0801] In particular, the cancer comprises a tumor that is a metastasized tumor, preferably wherein the tumor has migrated to lymph nodes or tissues near the original cancer or spread to more distant organs or tissues far from the original cancer.

[0802] The present disclosure also includes in vivo models, such as xenograft or transgenic animal models expressing within their genome or engrafted aberrant cells comprising a polynucleotide fusion as mentioned herein, and/or expressing a polypeptide fusion encoded therefrom, and treatment of such models with an ERB2 and/or Erb3 targeting agent or other targeting agent for evaluation of therapeutic activity of such agent. Preferably, the animal model is a non-human animal model.

[0803] In disclosed embodiments, said in vivo animal model comprises a polynucleotide fusion according to the present disclosure and/or expresses a polypeptide fusion encoded therefrom, wherein preferably the polynucleotide fusion or polypeptide fusion comprised by the animal model is comprised by an engrafted aberrant cell present in the animal model or comprised by the genome of the animal model.

[0804] In disclosed embodiments, the present disclosure provides a method of treatment of said in vivo animal model with an Erb2 and/or Erb3 targeting agent selected from the group consisting of a multispecific antibody comprising a first antigen-binding site that binds an extracellular part of ErbB-2 and a second antigen-binding site that binds an extracellular part of ErbB-3, a tyrosine kinase inhibitor of ErbB-2, a monospecific bivalent antibody comprising an antigen-binding site that bind an extracellular part of ErbB-2, a monospecific bivalent antibody comprising an antigen-binding site that bind an extracellular part of ErbB-3, or any combination thereof, said method comprising administering to the animal said Erb2 and/or Erb3 targeting agent.

[0805] In disclosed embodiments, the present disclosure provides an Erb2 and/or Erb3 targeting agent selected from the group consisting of a multispecific antibody comprising a first antigen-binding site that binds an extracellular part of ErbB-2 and a second antigen-binding site that binds an extracellular part of ErbB-3, a tyrosine kinase inhibitor of ErbB-2, a monospecific bivalent antibody comprising an antigen-binding site that bind an extracellular part of ErbB-2, a monospecific bivalent antibody comprising an antigen-binding site that bind an extracellular part of ErbB-3, or any combination thereof, for use in treatment of said in vivo animal model. Said method preferably comprises administering to the animal said Erb2 and/or Erb3 targeting agent.

### Dosing and Administration

[0806] Actual dosage levels of the active ingredients in the pharmaceutical compositions of the present disclosure or as administered in any method of treatment may be varied so as to obtain an amount of the active ingredient which is effective to achieve the desired therapeutic response for a particular patient, composition, and mode of administration, without being toxic to the patient. The selected dosage level will depend upon a variety of pharmacokinetic factors including the activity of the particular compositions of the present disclosure employed, the route of administration, the time of administration, the rate of excretion of the particular compound being employed, the duration of the treatment, other drugs, compounds and/or materials used in combination with the particular compositions employed, the age, sex, weight, condition, general health and prior medical history of the patient being treated, and like factors well known in the medical arts. Said active ingredient is preferably any ErbB-2 and/or ErbB-3 targeting agent of the present disclosure. Any approved active ingredient or drug undergoing a clinical trial, in particular once entered a phase two of a clinical trial, can be considered by a physician to be administered in accordance with the approved dosage regime or clinical trial dosage regime.

[0807] The amount of any ErbB-2 and/or ErbB-3 targeting agent as mentioned herein to be administered to a patient is typically in the therapeutic window, meaning that a sufficient quantity is used for obtaining a therapeutic effect, while the amount does not exceed a threshold value leading to an unacceptable extent of side-effects. The lower the amount of the therapeutic substance needed for obtaining a desired therapeutic effect, the larger the therapeutic window will typically be. The selected dosage level will depend upon a variety of factors including the route of administration, the time of administration, the rate of excretion of the particular compound being employed, the duration of the treatment, other drugs, compounds and/or materials used in combination, the age, sex, weight, condition, general health and prior medical history of the subject being treated, and like factors well known in the medical arts.

[0808] With respect to zenocutuzumab, it has a good safety profile at relatively high doses, thus providing a large therapeutic window compared to other targeted or cytotoxic, chemotherapy agents. Dosing of the bispecific antibody of the present disclosure follows a weekly, biweekly or tri-weekly administration regimen of 750 mg, preferably a bi-weekly dose of 750 mg. The dosing is preferably in subjects with pancreatic cancer, NSCLC or a solid tumor, and includes any subject having a solid tumor harboring an NRG1-fusion, wherein such subject has progressed upon the administration of chemotherapy, standard of care or an ErbB-2 or ErbB-3 targeting agent or TKI. Alternatively, a dosing regimen is followed comprising a weekly flat dose administration of 400 mg, preferably commenced after a single administration of 800 mg. Following this alternative dosing regimen, the bispecific antibody of the disclosure is preferably administered in a weekly dose of 400 mg for 3 weeks followed by 1 week without dosing. Next, one or more cycles of a period of four weeks, consisting of three weekly flat dosages of 400 mg, followed by a week without administration is followed. This is preferably followed until a therapeutic effect is observed.

[0809] Dosing preferably involves intravenous injections of two infusions of the bispecific antibody of the disclosure to arrive at the complete dose, preferably when dosing >360 mg antibody. Alternatively, a single infusion of the complete dose may be given for lower dosages, for instance when dosing ≤360 mg antibody. Pre-medication maybe included in the dosing regimen to mitigate infusion-related reactions.

### GENERAL

[0810] The articles “a” and “an” are used herein to refer to one or more than one (i.e. to one or at least one) of the grammatical object of the article.

[0811] Throughout the present specification and the accompanying claims, the words “comprise”, “include” and “having” and variations such as “comprises”, “comprising”, “includes” and “including” are to be interpreted inclusively. That is, these words are intended to convey the possible inclusion of other elements or integers not specifically recited, where the context allows.

[0812] “Percent (%) identity” as referring to nucleic acid or amino acid sequences is defined as the percentage of residues in a candidate sequence that are identical with the residues in a selected sequence, after aligning the sequences for optimal comparison purposes. In order to optimize the alignment between the two sequences gaps may be introduced in any of the two sequences that are compared. Such alignment can be carried out over the full length of the sequences being compared. Alternatively, the alignment may be carried out over a shorter length, for example over about 20, about 50, about 100 or more nucleic acids/based or amino acids. The sequence identity is the percentage of identical matches between the two sequences over the reported aligned region.

[0813] A comparison of sequences and determination of percentage of sequence identity between two sequences can be accomplished using a mathematical algorithm. The skilled person will be aware of the fact that several different computer programs are available to align two sequences and determine the identity between two sequences (Kruskal, J. B. (1983) An overview of sequence comparison In D. Sankoff and J. B. Kruskal, (ed.), Time warps, string edits and macromolecules: the theory and practice of sequence comparison, pp. 1-44 Addison Wesley). The percent sequence identity between two amino acid sequences or nucleic acid sequences may be determined using the Needleman and Wunsch algorithm for the alignment of two sequences. (Needleman, S. B. and Wunsch, C. D. (1970) J. Mol. Biol. 48, 443-453). The Needleman-Wunsch algorithm has been implemented in the computer program NEEDLE. For the purpose of this disclosure the NEEDLE program from the EMBOSS package is used to determine percent identity of amino acid and nucleic acid sequences (version 2.8.0 or higher, EMBOSS: The European Molecular Biology Open Software Suite (2000) Rice, P. Longden J. and Bleasby, A. Trends in Genetics 16, (6) pp 276-277, http://emboss.bioinformatics.nl/). For protein sequences, EBLOSUM62 is used for the substitution matrix. For DNA sequences, DNAFULL is used. The parameters used are a gap-open penalty of 10 and a gap extension penalty of 0.5.

[0814] After alignment by the program NEEDLE as described above the percentage of sequence identity between a query sequence and a sequence of the disclosure is calculated as follows: Number of corresponding positions in the alignment showing an identical amino acid or identical nucleotide in both sequences divided by the total length of the alignment after subtraction of the total number of gaps in the alignment.

[0815] “Allelic variant” means a naturally occurring allele of the specific sequence as identified in a patient derived sample, which sequence as identified has been assigned a SEQ ID NO, and which variant falls within a defined range of variability. The variability is defined as having at least 85% sequence identity to the sequence it is indicated to be an allelic variant of, preferably at least 90% identity, 92%, 94%, 95%, 96% or more preferably at least 98% sequence identity thereto. Such variants are considered an allele of the sequence it is compared with and therefore still qualify as the gene it is a variant of. If not expressly mentioned in relation to a particular allelic variant herein, these sequence identity percentages are still applicable to the allelic variant referred to.

[0816] A “bispecific antibody” means an antibody having one variable domain of the antibody that binds to a first antigen whereas a second variable domain of the antibody binds to a second antigen, wherein said first and second antigens are not identical. The term “bispecific antibody” also encompasses biparatopic antibodies, wherein one variable domain of the antibody binds to a first epitope on an antigen whereas a second variable domain of the antibody binds a second epitope on the same antigen. The term further includes antibodies wherein at least one VH is capable of specifically recognizing a first antigen and a VL, paired with the at least one VH in an immunoglobulin variable domain, is capable of specifically recognizing a second antigen. The resulting VH/VL pair will bind either antigen 1 or antigen 2, and are called “two-in-one antibodies”, described in for instance WO 2008/027236, WO 2010/108127 and Schaefer et al (Cancer Cell 20, 472-486, October 2011). A bispecific antibody according to the present disclosure is not limited to any particular bispecific format or method of producing it.

[0817] A “detectable label” means a chemical, biological, or other modification, including but not limited to fluorescence, mass, residue, dye, radioisotope, label, or tag modifications, etc., which allows the presence of the molecule, herein preferably a polynucleotide or polypeptide, of interest to be detected. Preferably, the detectable label is a visible label, a fluorescent dye, a quencher, a UV-detectable label, a chromogenic label, a radioactive label, an electrochemical label, a tag, an enzyme that produces a detectable label when in contact with a substrate specific for said enzyme or a molecular barcode. Exemplary fluorescent dyes include water-soluble rhodamine dyes, fluoresceins, 4,7-dichlorofluoresceins, benzoxanthene dyes and energy transfer dyes, as disclosed in the following references: Handbook of Molecular Probes and Research Reagents, 8th ed. (2002), Molecular Probes, Eugene, Oreg.; WO 2001/32783; U.S. Pat. Publ. Nos. US 2002-0081616, US 2002-0086985; and Lee et al., 1997, Nucleic Acids Research 25:2816-2822.

[0818] “Isolated” or “purified” means a nucleic acid or amino acid sequence that is removed from its natural environment, isolated or separated. An “isolated” nucleic acid molecule includes one which is separated from other nucleic acid molecules which are present in the natural source of the nucleic acid molecule. Also, an “isolated” nucleic acid molecule, such as a cDNA molecule, includes the state of being free of other cellular material or culture medium when produced by recombinant techniques, or substantially free of chemical precursors or other chemicals when chemically synthesized.

[0819] “Sample” herein means a sample obtained from a subject or patient. Such a sample is a biological sample or a patient sample, which terms are exchangeably used herein as the samples mentioned herein are biological samples obtained from patients. The term “sample” includes a liquid biopsy sample, a sample that is taken from a solid cancer or tumor and will contain polynucleotides fusions and/or polypeptides fusions before any processing is applied to it. In particular, the sample comprises an aberrant cell, such as a tumor cell or a cancer cell.

[0820] The language “free of other cellular material or culture medium” includes preparations of nucleic acid molecule in which the molecule is separated from cellular components of the cells from which it is isolated or recombinantly produced.

[0821] “Primer” means a single-stranded nucleotide molecule of sufficient length that specifically hybridizes to a nucleotide sequence of interest to allow specific binding, also referred to herein as hybridization or annealing, to a targeted or selected nucleotide sequence that, together with a second primer, defines a region of interest that is amplified in a polymerase chain reaction, or PCR. Herein, the first and second primers, or primer pairs, are specifically designed to amplify the nucleotide region spanning the NRG1 fusion junction. In particular, a combination of a first primer hybridizing to a nucleotide sequence specific for the NRG1 sequence part at one side of the fusion junction and a second primer hybridizing to a nucleotide sequence specific for a fusion partner selected from VAPB, CADM1, CD44, SLC3A2, VTCN1, CDH1, CXADR, GTF2E2, CSMD1, PTN, ST14, THBS1, AGRN, PVALB, APP, WRN, DAAM1, ASPH, NOTCH2, CD74, SDC4, SLC4A4, ZFAT or DSCAML1 at the other side of the fusion junction is used. Typically, a primer itself does not comprise a detectable label. Over the entire length of its target sequence in an NRG1 fusion polynucleotide, a primer typically has at least about 80%, at least about 85%, at least about 90%, at least about 95%, at least about 97%, at least about 98% or at least about 99% sequence identity to the target sequence. The polynucleotide primer is most preferably complementary (100% sequence identity over the entire length) to its target sequence. In all instances herein, sequence identity is typically measured over the entire length of the non-variant/target sequence.

[0822] “Probe” or “nucleic acid probe” means a single-stranded nucleotide molecule of sufficient length that specifically hybridizes to a nucleotide sequence of interest. In particular, in the context of the present disclosure, the probe allows detection of fusions occurring in VAPB, CADM1, CD44, SLC3A2, VTCN1, CDH1, CXADR, GTF2E2, CSMD1, PTN, ST14, THBS1, AGRN, PVALB, APP, WRN, DAAM1, ASPH, NOTCH2, CD74, SDC4, SLC4A4, ZFAT or DSCAML1, in particular a fusion selected from VAPB-NRG1, CADM1-NRG1, CD44-NRG1, SLC3A2-NRG1, VTCN1-NRG1, CDH1-NRG1, CXADR-NRG1, GTF2E2-NRG1, CSMD1-NRG1, PTN-NRG1, ST14-NRG1, THBS1-NRG1, AGRN-NRG1, PVALB-NRG1, APP-NRG1, WRN-NRG1, DAAM1-NRG1, ASPH-NRG1, NOTCH2-NRG1, CD74-NRG1, SDC4-NRG1, SLC4A4-NRG1, ZFAT-NRG1 and DSCAML1-NRG1. A probe typically comprises one or two detectable labels. Over the entire length of its target sequence in the NRG1 fusion polynucleotide, a polynucleotide probe typically has at least about 80%, at least about 85%, at least about 90%, at least about 95%, at least about 97%, at least about 98% or at least about 99% sequence identity to the target sequence. The polynucleotide primer is most preferably complementary (100% sequence identity over the entire length) to its target sequence. In all instances herein, sequence identity is typically measured over the entire length of the non-variant/target sequence.

[0823] The polynucleotide probe is preferably a DNA probe, a TaqMan probe, a molecular beacon, a scorpion probe or probe as used in FISH. DNA probes hybridise to the, typically complementary, target sequence and then can be detected, for instance using a detectable label. TaqMan probes are known in the art and are polynucleotides that have a fluorescent dye attached to the 5′ end and a quencher to the 3′ end. The polymerase used in PCR cleaves hybridised probes freeing the fluorescent dye from quenching such it can be detected. Molecular beacon probes are known in the art and are similar to TaqMan probes except (rather than using cleavage to separate the dye from the quencher) hybridisation to the target sequence separates the dye from the quencher. Scorpion probes are known the art and are similar to molecular beacons except the 3′ end also contains a sequence that is complementary to the extension product of the primer on the 5′ end which opens the probe on hybridisation and allows the dye to be detected. The polynucleotide probe is preferably a TaqMan probe. The polynucleotide probe is preferably a TaqMan probe and is used in any of the PCR methods discussed above.

[0824] A probe as used in a technique like FISH, or break apart FISH, has a suitable length and comprises a single detectable label. FISH involves detection of highly specific DNA probes which have been hybridized to either interphase or metaphase chromosomes that are made visible to allow detection using fluorescence microscopy. Break apart FISH is particularly suitable to detect fusion breakpoints. In that case, two ends of the gene of interest are labeled with different colors, and when a translocation occurs that gives rise to a fusion, the two individual colors do not co-localize and two primary colors are observed. In normal cells with normal copies of the labeled gene of interest, the two colors co-localize giving rise to a fused signal.

[0825] A probe or primer for identification of a fusion polynucleotide comprised by a cell, can be isolated or purified using standard molecular biology techniques or synthesized based on the sequence information in the database records described herein. Such nucleic acid molecules as described herein can be isolated using standard hybridization and cloning techniques (e.g. as described in Sambrook et al., ed., Molecular Cloning: A Laboratory Manual, 2nd ed., Cold Spring Harbor Laboratory Press, Cold Spring Harbor, NY, 1989). Also, a fusion polynucleotide can be isolated, purified or synthesized using any suitable standard molecular biological technique. In some embodiments, the primers or probe are specific for cDNA. For example, in some embodiments the primers or probes are specific for an exon-exon junction in cDNA.

[0826] “Polynucleotide fusion” means a covalently bonded connection between two polynucleotides, wherein on one side of the fusion junction a nucleotide sequence from one gene is present and on the other side a nucleotide sequence from another gene is present. In the context of polynucleotide fusions, the connection is operably linked in a manner that permits transcription into a protein. On one side, said nucleotide sequences are preferably from VAPB, CADM1, CD44, SLC3A2, VTCN1, CDH1, CXADR, GTF2E2, CSMD1, PTN, ST14, THBS1, AGRN, PVALB, APP, WRN, DAAM1, ASPH, NOTCH2, CD74, SDC4, SLC4A4, ZFAT or DSCAML1 and preferably from NRG1 on the other side of the fusion junction.

[0827] “Polypeptide fusion” means a covalently bonded connection between two amino acids, wherein on one side of the fusion junction an amino acid sequence from one polypeptide is present and on the other side an amino acid sequence from another polypeptide is present. On one side, said amino acid sequences are preferably from VAPB, CADM1, CD44, SLC3A2, VTCN1, CDH1, CXADR, GTF2E2, CSMD1, PTN, ST14, THBS1, AGRN, PVALB, APP, WRN, ASPH, NOTCH2, CD74, SDC4, SLC4A4, ZFAT or DSCAML1 and preferably from NRG1 on the other side of the fusion junction.

[0828] “Fusion partner” means a gene or polypeptide with which a fusion with the NRG1 gene or polypeptide has occurred due to a genetic rearrangement. In the present disclosure, the fusion partner is one of VAPB, CADM1, CD44, SLC3A2, VTCN1, CDH1, CXADR, GTF2E2, CSMD1, PTN, ST14, THBS1, AGRN, PVALB, APP, WRN, DAAM1, ASPH, NOTCH2, CD74, SDC4, SLC4A4, ZFAT or DSCAML1. Typically, the fusion partner is located upstream, (at the 5′ end of the sense strand) of the NRG1 gene, and is fused in-frame leading to translation into a chimeric protein which comprises a part of the fusion partner and an NRG1 part. A fusion gene results from joining parts of two different genes and a fusion polypeptide is the translational product from such fusion genes.

[0829] “Fusion point” means the position in an amino acid or nucleotide sequence where on one side of the position an NRG1 sequence is present and on the other side an NRG1 fusion partner sequence is present. It is the junction or position where genetic rearrangement occurs forming a chimeric gene, mRNA and/or protein sequence. The term “fusion point” herein is exchangeable with “junction” or “fusion junction”.

[0830] A “3′ located gene sequence” means any element, of regulatory nature or not, that is located downstream or 3′ of the gene referred to and considered to be part of said gene. A regulatory element herein includes an enhancer, silencer, response element, intron, exon, embedded promoter, which element is specific to the gene involved to allow amplification and identification of the fusion in a unique fashion due to the proximity to the fusion junction. A 3′ located gene sequence in this context also includes any gene sequences positioned in between any regulatory elements that can be used to uniquely identify a fusion as involved.

[0831] A “5′ located gene sequence” means any element, of regulatory nature or not, that is located upstream or 5′ of the gene referred to and considered to be part of said gene. A regulatory element herein includes a promoter, enhancer, silencer, response element, intron, exon, embedded promoter, which element is specific to the gene involved to allow amplification and identification of the fusion in a unique fashion due to the proximity to the fusion junction. A 5′ located gene sequence in this context also includes any gene sequences positioned in between any regulatory elements that can be used to uniquely identify a fusion as involved.

[0832] The term ‘ErbB-2’ as used herein refers to the protein that in humans is encoded by the ERBB-2 gene. Alternative names for the gene or protein include CD340; HER-2; HER-2/neu; MLN 19; NEU; NGL; TKR1. The ERBB-2 gene is frequently called HER2 (from human epidermal growth factor receptor 2). Where reference is made herein to ErbB-2, the reference refers to human ErbB-2. An antibody comprising an antigen-binding site that binds ErbB-2, binds human ErbB-2. The ErbB-2 antigen-binding site may, due to sequence and tertiary structure similarity between human and other mammalian orthologs, also bind such an ortholog but not necessarily so. Database accession numbers for the human ErbB-2 protein and the gene encoding it are (NP_001005862.1, NP_004439.2 NC_000017.10 NT_010783.15 NC_018928.2). The accession numbers are primarily given to provide a further method of identification of ErbB-2 as a target, the actual sequence of the ErbB-2 protein bound the antibody may vary, for instance because of a mutation in the encoding gene such as those occurring in some cancers or the like. The ErbB-2 antigen binding site binds ErbB-2 and a variety of variants thereof, such as those expressed by some ErbB-2 positive tumor cells. The antigen-binding site that binds ErbB-2 preferably binds domain I of ErbB-2.

[0833] The term ‘ErbB-3’ as used herein refers to the protein that in humans is encoded by the ERBB3 gene. Alternative names for the gene or protein are HER3; LCCS2; MDA-BF-1; c-ErbB-3; c-ErbB3; ErbB3-S; p180-ErbB3; p45-sErbB3; and p85-sErbB3. Where reference is made herein to ErbB-3, the reference refers to human ErbB-3. An antibody comprising an antigen-binding site that binds ErbB-3, binds human ErbB-3. The ErbB-3 antigen-binding site may, due to sequence and tertiary structure similarity between human and other mammalian orthologs, also bind such an ortholog but not necessarily so. Database accession numbers for the human ErbB-3 protein and the gene encoding it are (NP_001005915.1, NP_001973.2, NC_000012.11, NC_018923.2, NT_029419.12). The accession numbers are primarily given to provide a further method of identification of ErbB-3 as a target, the actual sequence of the ErbB-3 protein bound by an antibody may vary, for instance because of a mutation in the encoding gene such as those occurring in some cancers or the like. The ErbB-3 antigen binding site binds ErbB-3 and a variety of variants thereof, such as those expressed by some ErbB-3 positive tumor cells. The antigen-binding site that binds ErbB-3 preferably binds domain III of ErbB-3.

[0834] When reference is made to ErbB-2 or ErbB-3 or an alternative name for the same, the reference is to human ErbB-2 or ErbB-3. Antibodies as referred to herein bind to ErbB-2 or ErbB-3 and many mutated ErbB-2 or ErbB-3 proteins as can be found in cancers.

[0835] Any range of numerical SEQ ID NOs as mentioned herein expressly includes all the individual SEQ ID NOs falling within the relevant range and includes the end points thereof. Thus, for the avoidance of doubt, if for instance reference is made to SEQ ID NOs: 17-23, it is intended to mention and disclose SEQ ID NO: 17, SEQ ID NO: 18, SEQ ID NO: 19, SEQ ID NO: 20, SEQ ID NO: 21, SEQ ID NO: 22 and SEQ ID NO: 23 in the context the range of SEQ ID NOs is mentioned.

### CLAUSES

[0836] The following clauses describe exemplary embodiments.

[0837] 1. A polynucleotide comprising a VAPB nucleic acid sequence, or an allelic variant of the VAPB sequence, fused with an NRG1 nucleic acid sequence, or an allelic variant of the NRG1 sequence.

[0838] 2. The polynucleotide according to clause 1, wherein the VAPB nucleic acid sequence comprises or consists of any one of SEQ ID NOs: 17-23, or an allelic variant of any one of SEQ ID NOs: 17-23, and the NRG1 nucleic acid sequence comprises or consists of any one of SEQ ID NOs: 125-138.

[0839] 3. The polynucleotide according to clauses 1 or 2, wherein the VAPB nucleic acid sequence (or the allelic variant thereof), is 5′ to the NRG1 nucleic acid sequence (or the allelic variant thereof).

[0840] 4. The polynucleotide according to any one of the previous clauses, wherein the allelic variant of the VAPB nucleic acid sequences has at least 85% identity to any one of SEQ ID NOs: 17-23, preferably at least 90% identity, more preferably at least 95% sequence identity; and the allelic variant of the NRG1 nucleic acid sequences has at least 85% identity to any one of SEQ ID NOs: 125-138, preferably at least 90% identity, more preferably at least 95% sequence identity.

[0841] 5. The polynucleotide according to any one of the previous clauses, wherein the fusion of the VAPB nucleic acid with the NRG1 nucleic acid comprises 2 to about 40 contiguous nucleic acids from SEQ ID NO: 3, preferably including the nucleic acids at positions 43 and 44.

[0842] 6. The polynucleotide according to any one of the previous clauses, wherein the nucleic acid encoding the NRG1 protein sequence (or the allelic variant thereof), comprises or encodes an EGF-like domain of NRG1, preferably the EGF-like domain according to SEQ ID NO: 163.

[0843] 7. A polynucleotide comprising
[0844] a PVALB nucleic acid sequence, or an allelic variant of the PVALB sequence, fused with an NRG1 nucleic acid sequence, or an allelic variant of the NRG1 sequence or
[0845] a ASPH nucleic acid sequence, or an allelic variant of the ASPH sequence, fused with an NRG1 nucleic acid sequence, or an allelic variant of the NRG1 sequence or
[0846] a DAAM1 nucleic acid sequence, or an allelic variant of the DAAM1 sequence, fused with an NRG1 nucleic acid sequence, or an allelic variant of the NRG1 sequence or
[0847] a ZFAT nucleic acid sequence, or an allelic variant of the ZFAT sequence, fused with an NRG1 nucleic acid sequence, or an allelic variant of the NRG1 sequence or
[0848] a DSCAML1 nucleic acid sequence, or an allelic variant of the DSCAML1 sequence, fused with an NRG1 nucleic acid sequence, or an allelic variant of the NRG1 sequence.

[0849] 8. The polynucleotide according to clause 7, wherein
[0850] the PVALB nucleic acid sequence comprises or consists of any one of SEQ ID NOs: 439-444, or an allelic variant of any one of SEQ ID NOs: 439-444, and the NRG1 nucleic acid sequence comprises or consists of any one of SEQ ID NOs: 125-138;
[0851] the DAAM1 nucleic acid sequence comprises or consists of any one of SEQ ID NOs: 606-631, or an allelic variant of any one of SEQ ID NOs: 606-631, and the NRG1 nucleic acid sequence comprises or consists of any one of SEQ ID NOs: 125-138;
[0852] the ZFAT nucleic acid sequence comprises or consists of any one of SEQ ID NOs: 830-846, or an allelic variant of any one of SEQ ID NOs: 830-846, and the NRG1 nucleic acid sequence comprises or consists of any one of SEQ ID NOs: 125-138; or
[0853] the DSCAML1 nucleic acid sequence comprises or consists of any one of SEQ ID NOs: 870-903, or an allelic variant of any one of SEQ ID NOs: 870-903, and the NRG1 nucleic acid sequence comprises or consists of any one of SEQ ID NOs: 125-138.

[0854] 9. The polynucleotide according to clauses 7 or 8, wherein the PVALB, DAAM1, ZFAT or DSCAML1 nucleic acid sequence (or the allelic variant thereof), is 5′ to the NRG1 nucleic acid sequence (or the allelic variant thereof).

[0855] 10. The polynucleotide according to any one of clauses 7-9, wherein
[0856] the allelic variant of the PVALB nucleic acid sequences has at least 85% identity to any one of SEQ ID NOs: 439-444, preferably at least 90% identity, more preferably at least 95% sequence identity; and the allelic variant of the NRG1 nucleic acid sequences has at least 85% identity to any one of SEQ ID NOs: 125-138, preferably at least 90% identity, more preferably at least 95% sequence identity;
[0857] the allelic variant of the DAAM1 nucleic acid sequences has at least 85% identity to any one of SEQ ID NOs: 606-631, preferably at least 90% identity, more preferably at least 95% sequence identity; and the allelic variant of the NRG1 nucleic acid sequences has at least 85% identity to any one of SEQ ID NOs: 125-138, preferably at least 90% identity, more preferably at least 95% sequence identity;
[0858] the allelic variant of the ZFAT nucleic acid sequences has at least 85% identity to any one of SEQ ID NOs: 830-846, preferably at least 90% identity, more preferably at least 95% sequence identity; and the allelic variant of the NRG1 nucleic acid sequences has at least 85% identity to any one of SEQ ID NOs: 125-138, preferably at least 90% identity, more preferably at least 95% sequence identity; or
[0859] the allelic variant of the DSCAML1 nucleic acid sequences has at least 85% identity to any one of SEQ ID NOs: 870-903, preferably at least 90% identity, more preferably at least 95% sequence identity; and the allelic variant of the NRG1 nucleic acid sequences has at least 85% identity to any one of SEQ ID NOs: 125-138, preferably at least 90% identity, more preferably at least 95% sequence identity.

[0860] 11. The polynucleotide according to any one of clauses 7-10, wherein
[0861] the fusion of the PVALB nucleic acid with the NRG1 nucleic acid comprises 2 to about 40 contiguous nucleic acids from SEQ ID NO: 437, preferably including the nucleic acids at positions 102 and 103;
[0862] the fusion of the DAAM1 nucleic acid with the NRG1 nucleic acid comprises 2 to about 40 contiguous nucleic acids from SEQ ID NO: 605, preferably including the nucleic acids at positions 75 and 76;
[0863] the fusion of the ZFAT nucleic acid with the NRG1 nucleic acid comprises 2 to about 40 contiguous nucleic acids from SEQ ID NO: 828, preferably including the nucleic acids at positions 75 and 76; or
[0864] the fusion of the DSCAML1 nucleic acid with the NRG1 nucleic acid comprises 2 to about 40 contiguous nucleic acids from SEQ ID NO: 868, preferably including the nucleic acids at positions 75 and 76.

[0865] 12. The polynucleotide according to any one of clauses 7-11, wherein the nucleic acid encoding the NRG1 protein sequence (or the allelic variant thereof), comprises or encodes an EGF-like domain of NRG1, preferably the EGF-like domain according to SEQ ID NO: 163.

[0866] 13. A polynucleotide comprising:
[0867] a portion of exon 1 of VAPB, or of an allelic variant of exon 1, fused with a portion of exon 2 of NRG1, or an allelic variant of exon 2;
[0868] a portion of exon 7 of CADM1, or of an allelic variant of exon 7, and a portion of exon 6 of NRG1, or an allelic variant of exon 6;
[0869] a portion of exon 5 of CD44, or of an allelic variant of exon 5, and a portion of exon 2 of NRG1, or an allelic variant of exon 2;
[0870] a portion of exon 1 of transcript version 6 of SLC3A2, or of an allelic variant of exon 1, and a portion of exon 5 of NRG1, or an allelic variant of exon 5;
[0871] a portion of exon 2 of VTCN1, or of an allelic variant of exon 2, and a portion of exon 2 of NRG1, or an allelic variant of exon 2;
[0872] a portion of exon 11 of CDH1, or of an allelic variant of exon 11, and a portion of exon 2 of NRG1, or an allelic variant of exon 2;
[0873] a portion of exon 1 of CXADR, or of an allelic variant of exon 1, and a portion of exon 2 of NRG1, or an allelic variant of exon 2;
[0874] a portion of exon 2 of GTF2E2, or of an allelic variant of exon 2, and a portion of exon 2 of NRG1, or an allelic variant of exon 2;
[0875] a portion of exon 23 of CSMD1, or of an allelic variant of exon 23, and a portion of exon 6 of NRG1, or an allelic variant of exon 6;
[0876] a portion of exon 4 of PTN, or of an allelic variant of exon 4, and a portion of exon 2 of NRG1, or an allelic variant of exon 2;
[0877] a portion of exon 11 of ST14, or of an allelic variant of exon 11, and a portion of exon 6 of NRG1, or an allelic variant of exon 6;
[0878] a portion of exon 9 of THBS1, or of an allelic variant of exon 9, and a portion of exon 6 of NRG1, or an allelic variant of exon 6;
[0879] a portion of exon 12 of AGRN, or of an allelic variant of exon 12, and a portion of exon 6 of NRG1, or an allelic variant of exon 6;
[0880] a portion of exon 4 of PVALB, or of an allelic variant of exon 4, and a portion of exon 6 of NRG1, or an allelic variant of exon 6;
[0881] a portion of exon 2 of transcript version 3 of SLC3A2, or of an allelic variant of exon 2, and a portion of exon 6 of NRG1, or an allelic variant of exon 6;
[0882] a portion of exon 14 of APP, or of an allelic variant of exon 14, and a portion of exon 6 of NRG1, or an allelic variant of exon 6;
[0883] a portion of exon 33 of WRN, or of an allelic variant of exon 33, and a portion of exon 6 of NRG1, or an allelic variant of exon 6;
[0884] a portion of exon 1 of DAAM1, or of an allelic variant of exon 1, and a portion of exon 1 of NRG1, or an allelic variant of exon 1;
[0885] a portion of exon 22 of ASPH, or of an allelic variant of exon 22, and a portion of exon 2 of NRG1, or an allelic variant of exon 2;
[0886] a portion of exon 6 of NOTCH2, or of an allelic variant of exon 6, and a portion of exon 6 of NRG1, or an allelic variant of exon 6;
[0887] a portion of exon 2 of CD74, or of an allelic variant of exon 2, and a portion of exon 2 of NRG1, or an allelic variant of exon 2;
[0888] a portion of exon 2 of SDC4, or of an allelic variant of exon 2, and a portion of exon 2 of NRG1, or an allelic variant of exon 2;
[0889] a portion of exon 5 of CD44, or of an allelic variant of exon 5, and a portion of exon 6 of NRG1, or an allelic variant of exon 6;
[0890] a portion of exon 14 of SLC4A4, or of an allelic variant of exon 14, and a portion of exon 6 of NRG1, or an allelic variant of exon 6;
[0891] a portion of exon 4 of SDC4, or of an allelic variant of exon 4, and a portion of exon 2 of NRG1, or an allelic variant of exon 2;
[0892] a portion of exon 12 of ZFAT, or of an allelic variant of exon 12, and a portion of exon 6 of NRG1, or an allelic variant of exon 6, or
[0893] a portion of exon 3 of DSCAML1, or of an allelic variant of exon 3, and a portion of exon 2 of NRG1, or an allelic variant of exon 2.

[0894] 14. The polynucleotide according to clause 13, wherein exon 1 of VAPB is that of SEQ ID NO: 17; exon 7 of CADM1 is that of SEQ ID NO: 39; exon 5 of CD44 is that of SEQ ID NO: 65; exon 1 of SLC3A2 is that of SEQ ID NO: 103; exon 2 of VTCN1 is that of SEQ ID NO: 169; exon 11 of CDH1 is that of SEQ ID NO: 198; exon 1 of CXADR is that of SEQ ID NO: 219; exon 2 of GTF2E2 is that of SEQ ID NO: 236; exon 23 of CSMD1 is that of SEQ ID NO: 279; exon 4 of PTN is that of SEQ ID NO: 318; exon 11 of ST14 is that of SEQ ID NO: 342; exon 9 of THBS1 is that of SEQ ID NO: 386; exon 12 of AGRN is that of SEQ ID NO: 416; exon 4 of PVALB is that of SEQ ID NO: 442; exon 2 of SLC3A2 is that of SEQ ID NO: 457; exon 14 of APP is that of SEQ ID NO: 501; exon 33 of WRN is that of SEQ ID NO: 562; exon 1 of DAAM1 is that of SEQ ID NO: 606; exon 22 of ASPH is that of SEQ ID NO: 658; exon 6 of NOTCH2 is that of SEQ ID NO: 700; exon 2 of CD74 is that of SEQ ID NO: 720; exon 2 of SDC4 is that of SEQ ID NO: 746; exon 5 of CD44 is that of SEQ ID NO: 65; exon 14 of SLC4A4 is that of SEQ ID NO: 780; exon 4 of SDC4 is that of SEQ ID NO: 748; exon 12 of ZFAT is that of SEQ ID NO: 841; exon 3 of DSCAML1 is that of SEQ ID NO: 872 and exons 1, 2, 5 and 6 of NRG1 are those of SEQ ID NOs: 125, 126, 129 and 130, respectively.

[0895] 15. The polynucleotide according to any one of clauses 13 or 14, wherein: —the portion of exon 1 of VAPB, or the allelic variant thereof, is 5′ to the portion of exon 2 of NRG1, or the allelic variant thereof;
[0896] the portion of exon 7 of CADM1, or the allelic variant thereof, is 5′ to the portion of exon 6 of NRG1, or the allelic variant thereof;
[0897] the portion of exon 5 of CD44, or the allelic variant thereof, is 5′ to the portion of exon 2 of NRG1, or the allelic variant thereof;
[0898] the portion of exon 1 of SLC3A2, or the allelic variant thereof, is 5′ to the portion of exon 5 of NRG1, or the allelic variant thereof;
[0899] the portion of exon 2 of VTCN1, or the allelic variant thereof, is 5′ to the portion of exon 2 of NRG1, or the allelic variant thereof;
[0900] the portion of exon 11 of CDH1, or the allelic variant thereof, is 5′ to the portion of exon 2 of NRG1, or the allelic variant thereof;
   [0901] the portion of exon 1 of CXADR, or the allelic variant thereof, is 5′ to the portion of exon 2 of NRG1, or the allelic variant thereof;
   [0902] the portion of exon 2 of GTF2E2, or the allelic variant thereof, is 5′ to the portion of exon 2 of NRG1, or the allelic variant thereof;
   [0903] the portion of exon 23 CSMD1, or the allelic variant thereof, is 5′ to the portion of exon 6 of NRG1, or the allelic variant thereof;
   [0904] the portion of exon 4 PTN, or the allelic variant thereof, is 5′ to the portion of exon 2 of NRG1, or the allelic variant thereof;
   [0905] the portion of exon 11 ST14, or the allelic variant thereof, is 5′ to the portion of exon 6 of NRG1, or the allelic variant thereof;
   [0906] the portion of exon 9 THBS1, or the allelic variant thereof, is 5′ to the portion of exon 6 of NRG1, or the allelic variant thereof;
   [0907] the portion of exon 12 AGRN, or the allelic variant thereof, is 5′ to the portion of exon 6 of NRG1, or the allelic variant thereof;
   [0908] the portion of exon 4 PVALB, or the allelic variant thereof, is 5′ to the portion of exon 6 of NRG1, or the allelic variant thereof;
   [0909] the portion of exon 2 SCL3A2, or the allelic variant thereof, is 5′ to the portion of exon 6 of NRG1, or the allelic variant thereof;
   [0910] the portion of exon 14 of APP, or the allelic variant thereof, is 5′ to the portion of exon 6 of NRG1, or the allelic variant of exon 6;
   [0911] the portion of exon 33 of WRN, or the allelic variant thereof, is 5′ to the portion of exon 6 of NRG1, or the allelic variant of exon 6;
   [0912] the portion of exon 1 of DAAM1, or the allelic variant thereof, is 5′ to the portion of exon 1 of NRG1, or the allelic variant of exon 1;
   [0913] the portion of exon 22 of ASPH, or the allelic variant thereof, is 5′ to the portion of exon 2 of NRG1, or the allelic variant of exon 2;
   [0914] the portion of exon 6 of NOTCH2, or the allelic variant thereof, is 5′ to the portion of exon 6 of NRG1, or the allelic variant of exon 6;
   [0915] the portion of exon 2 of CD74, or the allelic variant thereof, is 5′ to the portion of exon 2 of NRG1, or the allelic variant of exon 2;
   [0916] the portion of exon 2 of SDC4, or the allelic variant thereof, is 5′ to the portion of exon 2 of NRG1, or the allelic variant of exon 2;
   [0917] the portion of exon 5 of CD44, or the allelic variant thereof, is 5′ to the portion of exon 6 of NRG1, or the allelic variant of exon 6;
   [0918] the portion of exon 14 of SLC4A4, or the allelic variant thereof, is 5′ to the portion of exon 6 of NRG1, or the allelic variant of exon 6;
   [0919] a portion of exon 4 of SDC4, or the allelic variant thereof, is 5′ to the portion of exon 2 of NRG1, or the allelic variant of exon 2;
   [0920] the portion of exon 12 of ZFAT, or the allelic variant thereof, is 5′ to the portion of exon 6 of NRG1, or the allelic variant of exon 6, and
   [0921] the portion of exon 3 of DSCAML1, or the allelic variant thereof, is 5′ to the portion of exon 2 of NRG1, or the allelic variant of exon 2.

[0922] 16. The polynucleotide according to any one of clauses 13-15, wherein:
[0923] the allelic variant of exon 1 of VAPB has at least 85% identity to SEQ ID NO: 17, preferably at least 90%, 92%, 94%, 96% or even 98% identity thereto;
[0924] the allelic variant of exon 7 of CADM1 has at least 85% identity to SEQ ID NO: 39, preferably at least 90%, 92%, 94%, 96% or even 98% identity thereto;
[0925] the allelic variant of exon 5 of CD44 has at least 85% identity to SEQ ID NO: 65, preferably at least 90% identity, more preferably at least 95% sequence identity, or preferably at least 90%, 92%, 94%, 96% or even 98% identity thereto;
[0926] the allelic variant of exon 1 of SLC3A2 has at least 85% identity to SEQ ID NO: 103, preferably at least 90%, 92%, 94%, 96% or even 98% identity thereto;
[0927] the allelic variant of exon 2 of VTCN1 has at least 85% identity to SEQ ID NO: 169, preferably at least 90%, 92%, 94%, 96% or even 98% identity thereto;
[0928] the allelic variant of exon 11 of CDH1 has at least 85% identity to SEQ ID NO: 198, preferably at least 90%, 92%, 94%, 96% or even 98% identity thereto;
[0929] the allelic variant of exon 2 of NRG1 has at least 85% identity to SEQ ID NO: 126, preferably at least 90%, 92%, 94%, 96% or even 98% identity thereto;
[0930] the allelic variant of exon 5 of NRG1 has at least 85% identity to SEQ ID NO: 129, preferably at least 90%, 92%, 94%, 96% or even 98% identity thereto;
[0931] the allelic variant of exon 6 of NRG1 has at least 85% identity to SEQ ID NO: 130, preferably at least 90%, 92%, 94%, 96% or even 98% identity thereto;
   [0932] the allelic variant of exon 1 of CXADR has at least 85% identity to SEQ ID NO: 219, preferably at least 90%, 92%, 94%, 96% or even 98% identity thereto;
   [0933] the allelic variant of exon 2 of GTF2E2 has at least 85% identity to SEQ ID NO: 236, preferably at least 90%, 92%, 94%, 96% or even 98% identity thereto;
   [0934] the allelic variant of exon 23 of CSMD1 has at least 85% identity to SEQ ID NO: 279, preferably at least 90%, 92%, 94%, 96% or even 98% identity thereto;
   [0935] the allelic variant of exon 4 of PTN has at least 85% identity to SEQ ID NO: 318, preferably at least 90%, 92%, 94%, 96% or even 98% identity thereto;
   [0936] the allelic variant of exon 11 of ST14 has at least 85% identity to SEQ ID NO: 342, preferably at least 90%, 92%, 94%, 96% or even 98% identity thereto;
   [0937] the allelic variant of exon 9 of THBS1 has at least 85% identity to SEQ ID NO: 386, preferably at least 90%, 92%, 94%, 96% or even 98% identity thereto;
   [0938] the allelic variant of exon 12 of AGRN has at least 85% identity to SEQ ID NO: 416, preferably at least 90%, 92%, 94%, 96% or even 98% identity thereto;
   [0939] the allelic variant of exon 4 of PVALB has at least 85% identity to SEQ ID NO: 442, preferably at least 90%, 92%, 94%, 96% or even 98% identity thereto;
   [0940] the allelic variant of exon 2 of SCL3A2 has at least 85% identity to SEQ ID NO: 457, preferably at least 90%, 92%, 94%, 96% or even 98% identity thereto;
   [0941] the allelic variant of exon 14 of APP has at least 85% identity to SEQ ID NO: 501, preferably at least 90%, 92%, 94%, 96% or even 98% identity thereto;
   [0942] the allelic variant of exon 33 of WRN has at least 85% identity to SEQ ID NO: 562, preferably at least 90%, 92%, 94%, 96% or even 98% identity thereto;
   [0943] the allelic variant of exon 1 of DAAM1 has at least 85% identity to SEQ ID NO: 606, preferably at least 90%, 92%, 94%, 96% or even 98% identity thereto;
   [0944] the allelic variant of exon 1 of NRG1 has at least 85% identity to SEQ ID NO: 125, preferably at least 90%, 92%, 94%, 96% or even 98% identity thereto;
   [0945] the allelic variant of exon 22 of ASPH has at least 85% identity to SEQ ID NO: 658, preferably at least 90%, 92%, 94%, 96% or even 98% identity thereto;
   [0946] the allelic variant of exon 6 of NOTCH2 has at least 85% identity to SEQ ID NO: 700, preferably at least 90%, 92%, 94%, 96% or even 98% identity thereto;
   [0947] the allelic variant of exon 2 of CD74 has at least 85% identity to SEQ ID NO: 720, preferably at least 90%, 92%, 94%, 96% or even 98% identity thereto;
   [0948] the allelic variant of exon 2 of SDC4 has at least 85% identity to SEQ ID NO: 746, preferably at least 90%, 92%, 94%, 96% or even 98% identity thereto;
   [0949] the allelic variant of exon 5 of CD44 has at least 85% identity to SEQ ID NO: 65, preferably at least 90%, 92%, 94%, 96% or even 98% identity thereto;
   [0950] the allelic variant of exon 14 of SLC4A4 has at least 85% identity to SEQ ID NO: 780, preferably at least 90%, 92%, 94%, 96% or even 98% identity thereto;
   [0951] the allelic variant of exon 4 of SDC4 has at least 85% identity to SEQ ID NO: 748, preferably at least 90%, 92%, 94%, 96% or even 98% identity thereto;
   [0952] the allelic variant of exon 12 of ZFAT has at least 85% identity to SEQ ID NO: 841, preferably at least 90%, 92%, 94%, 96% or even 98% identity thereto; and
   [0953] the allelic variant of exon 3 of DSCAML1 has at least 85% identity to SEQ ID NO: 872, preferably at least 90%, 92%, 94%, 96% or even 98% identity thereto.

[0954] 17. The polynucleotide according to any one of clauses 13-16, wherein:
[0955] the fusion of VAPB with NRG1 comprises 2 to about 40 contiguous nucleic acids from SEQ ID NO: 3, including the nucleic acids at position 43 and 44;
[0956] the fusion of CADM1 with NRG1 comprises 2 to about 40 contiguous nucleic acids from SEQ ID NO: 7, including the nucleic acids at position 53 and 54;
[0957] the fusion of CD44 with NRG1 comprises 2 to about 40 contiguous nucleic acids from SEQ ID NO: 11, including the nucleic acids at position 52 and 53;
[0958] the fusion of SLC3A2 with NRG1 comprises 2 to about 40 contiguous nucleic acids from SEQ ID NO: 15, including the nucleic acids at position 53 and 54;
[0959] the fusion of VTCN1 with NRG1 comprises 2 to about 40 contiguous nucleic acids from SEQ ID NO: 166, including the nucleic acids at position 65 and 66;
[0960] the fusion of CDH1 with NRG1 comprises 2 to about 40 contiguous nucleic acids from SEQ ID NO: 186, including the nucleic acids at position 119 and 120;
[0961] the fusion of CXADR with NRG1 comprises 2 to about 40 contiguous nucleic acids from SEQ ID NO: 217, including the nucleic acids at position 43 and 44;
[0962] the fusion of GTF2E2 with NRG1 comprises 2 to about 40 contiguous nucleic acids from SEQ ID NO: 233, including the nucleic acids at position 141 and 142;
[0963] the fusion of CSMD1 with NRG1 comprises 2 to about 40 contiguous nucleic acids from SEQ ID NO: 255, including the nucleic acids at position 88 and 89;
[0964] the fusion of PTN with NRG1 comprises 2 to about 40 contiguous nucleic acids from SEQ ID NO: 313, including the nucleic acids at position 102 and 103;
[0965] the fusion of ST14 with NRG1 comprises 2 to about 40 contiguous nucleic acids from SEQ ID NO: 330, including the nucleic acids at position 95 and 96;
[0966] the fusion of THBS1 with NRG1 comprises 2 to about 40 contiguous nucleic acids from SEQ ID NO: 376, including the nucleic acids at position 56 and 57;
[0967] the fusion of AGRN with NRG1 comprises 2 to about 40 contiguous nucleic acids from SEQ ID NO: 403, including the nucleic acids at position 106 and 107;
[0968] the fusion of PVALB with NRG1 comprises 2 to about 40 contiguous nucleic acids from SEQ ID NO: 437, including the nucleic acids at position 102 and 103;
[0969] the fusion of SLC3A2 with NRG1 comprises 2 to about 40 contiguous nucleic acids from SEQ ID NO: 454, including the nucleic acids at position 93 and 94;
[0970] the fusion of APP with NRG1 comprises 2 to about 40 contiguous nucleic acids from SEQ ID NO: 486, including the nucleic acids at position 54 and 55;
[0971] the fusion of WRN with NRG1 comprises 2 to about 40 contiguous nucleic acids from SEQ ID NO: 528, including the nucleic acids at position 96 and 97;
[0972] the fusion of DAAM1 with NRG1 comprises 2 to about 40 contiguous nucleic acids from SEQ ID NO: 605, including the nucleic acids at position 75 and 76;
[0973] the fusion of ASPH with NRG1 comprises 2 to about 40 contiguous nucleic acids from SEQ ID NO: 635, including the nucleic acids at position 75 and 76;
[0974] the fusion of NOTCH2 with NRG1 comprises 2 to about 40 contiguous nucleic acids from SEQ ID NO: 693, including the nucleic acids at position 75 and 76;
[0975] the fusion of CD74 with NRG1 comprises 2 to about 40 contiguous nucleic acids from SEQ ID NO: 717, including the nucleic acids at position 75 and 76;
[0976] the fusion of SDC4 with NRG1 comprises 2 to about 40 contiguous nucleic acids from SEQ ID NO: 743, including the nucleic acids at position 75 and 76;
[0977] the fusion of CD44 with NRG1 comprises 2 to about 40 contiguous nucleic acids from SEQ ID NO: 761, including the nucleic acids at position 75 and 76;
[0978] the fusion of SLC4A4 with NRG1 comprises 2 to about 40 contiguous nucleic acids from SEQ ID NO: 765, including the nucleic acids at position 75 and 76;
[0979] the fusion of SDC4 with NRG1 comprises 2 to about 40 contiguous nucleic acids from SEQ ID NO: 824, including the nucleic acids at position 75 and 76;
[0980] the fusion of ZFAT with NRG1 comprises 2 to about 40 contiguous nucleic acids from SEQ ID NO: 828, including the nucleic acids at position 75 and 76; and
[0981] the fusion of DSCAML1 with NRG1 comprises 2 to about 40 contiguous nucleic acids from SEQ ID NO: 868, including the nucleic acids at position 75 and 76.

[0982] 18. The polynucleotide according to any one of clauses 13-17, wherein:
[0983] the fusion of VAPB with NRG1 comprises SEQ ID NO: 3, or an allelic variant thereof;
[0984] the fusion of CADM1 with NRG1 comprises SEQ ID NO: 7, or an allelic variant thereof;
[0985] the fusion of CD44 with NRG1 comprises SEQ ID NO: 11, or an allelic variant thereof;
[0986] the fusion of SLC3A2 with NRG1 comprises SEQ ID NO: 15, or an allelic variant thereof;
[0987] the fusion of VTCN1 with NRG1 comprises SEQ ID NO: 166, or an allelic variant thereof;
[0988] the fusion of CDH1 with NRG1 comprises SEQ ID NO: 186, or an allelic variant thereof;
[0989] the fusion of CXADR with NRG1 comprises SEQ ID NO: 217, or an allelic variant thereof;
[0990] the fusion of GTF2E2 with NRG1 comprises SEQ ID NO: 233, or an allelic variant thereof;
[0991] the fusion of CSMD1 with NRG1 comprises SEQ ID NO: 255, or an allelic variant thereof;
[0992] the fusion of PTN with NRG1 comprises SEQ ID NO: 313, or an allelic variant thereof;
[0993] the fusion of ST14 with NRG1 comprises SEQ ID NO: 330, or an allelic variant thereof;
[0994] the fusion of THBS1 with NRG1 comprises SEQ ID NO: 376, or an allelic variant thereof;
[0995] the fusion of AGRN with NRG1 comprises SEQ ID NO: 403, or an allelic variant thereof;
[0996] the fusion of PVALB with NRG1 comprises SEQ ID NO: 437, or an allelic variant thereof;
[0997] the fusion of SLC3A2 with NRG1 comprises SEQ ID NO: 454, or an allelic variant thereof;
[0998] the fusion of APP with NRG1 comprises SEQ ID NO: 486, or an allelic variant thereof;
[0999] the fusion of WRN with NRG1 comprises SEQ ID NO: 528, or an allelic variant thereof;
[1000] the fusion of DAAM1 with NRG1 comprises SEQ ID NO: 605, or an allelic variant thereof;
[1001] the fusion of ASPH with NRG1 comprises SEQ ID NO: 635, or an allelic variant thereof;
[1002] the fusion of NOTCH2 with NRG1 comprises SEQ ID NO: 693, or an allelic variant thereof;
[1003] the fusion of CD74 with NRG1 comprises SEQ ID NO: 717, or an allelic variant thereof;
[1004] the fusion of SDC4 with NRG1 comprises SEQ ID NO: 743, or an allelic variant thereof;
[1005] the fusion of CD44 with NRG1 comprises SEQ ID NO: 761, or an allelic variant thereof;
[1006] the fusion of SLC4A4 with NRG1 comprises SEQ ID NO: 765, or an allelic variant thereof;
[1007] the fusion of SDC4 with NRG1 comprises SEQ ID NO: 824, or an allelic variant thereof;
[1008] the fusion of ZFAT with NRG1 comprises SEQ ID NO: 828, or an allelic variant thereof; and
[1009] the fusion of DSCAML1 with NRG1 comprises SEQ ID NO: 868, or an allelic variant thereof.

[1010] 19. The polynucleotide according to any one of clauses 13-18, wherein:
[1011] the portion of exon 1 of VAPB is or comprises SEQ ID NO: 1, or an allelic variant SEQ ID NO: 1;
[1012] the portion of exon 7 of CADM1 is or comprises SEQ ID NO: 5, or an allelic variant of SEQ ID NO: 5;
[1013] the portion of exon 5 of CD44 is or comprises SEQ ID NO: 9, or an allelic variant SEQ ID NO: 9;
[1014] the portion of exon 1 of SLC3A2 is or comprises SEQ ID NO: 13, or an allelic variant SEQ ID NO: 13;
[1015] the portion of exon 2 of VTCN1 is or comprises SEQ ID NO: 164, or an allelic variant SEQ ID NO: 164;
   [1016] the portion of exon 11 of CDH1 is or comprises SEQ ID NO: 184, or an allelic variant SEQ ID NO: 184;
   [1017] the portion of exon 1 of CXADR is or comprises SEQ ID NO: 219, or an allelic variant SEQ ID NO: 219;
   [1018] the portion of exon 2 of GTF2E2 is or comprises SEQ ID NO: 236, or an allelic variant SEQ ID NO: 236;
   [1019] the portion of exon 23 of CXADR is or comprises SEQ ID NO: 279, or an allelic variant SEQ ID NO: 279;
   [1020] the portion of exon 4 of PTN is or comprises SEQ ID NO: 318, or an allelic variant SEQ ID NO: 318;
   [1021] the portion of exon 11 of ST14 is or comprises SEQ ID NO:342, or an allelic variant SEQ ID NO: 342;
   [1022] the portion of exon 9 of THBS1 is or comprises SEQ ID NO: 385, or an allelic variant SEQ ID NO: 386;
   [1023] the portion of exon 12 of AGRN is or comprises SEQ ID NO: 416, or an allelic variant SEQ ID NO: 416;
   [1024] the portion of exon 4 of PVALB is or comprises SEQ ID NO: 442, or an allelic variant SEQ ID NO: 442;
   [1025] the portion of exon 2 of SLC3A2 is or comprises SEQ ID NO: 457, or an allelic variant SEQ ID NO: 457;
[1026] the portion of exon 2 of NRG1 is or comprises SEQ ID NO: 165, or an allelic variant SEQ ID NO: 165;
[1027] the portion of exon 5 of NRG1 is or comprises SEQ ID NO: 14, or an allelic variant SEQ ID NO: 14;
[1028] the portion of exon 6 of NRG1 is or comprises SEQ ID NO: 6, or an allelic variant thereof;
   [1029] the portion of exon 14 of APP is or comprises SEQ ID NO: 484, or an allelic variant thereof;
   [1030] the portion of exon 33 of WRN is or comprises SEQ ID NO: 526, or an allelic variant thereof;
   [1031] the portion of exon 1 of DAAM1 is or comprises SEQ ID NO: 603, or an allelic variant thereof;
   [1032] the portion of exon 22 of ASPH is or comprises SEQ ID NO: 633, or an allelic variant thereof;
   [1033] the portion of exon 6 of NOTCH2 is or comprises SEQ ID NO: 691, or an allelic variant thereof;
   [1034] the portion of exon 2 of CD74 is or comprises SEQ ID NO: 715, or an allelic variant thereof;
   [1035] the portion of exon 2 of SDC4 is or comprises SEQ ID NO: 741, or an allelic variant thereof;
   [1036] the portion of exon 5 of CD44 is or comprises SEQ ID NO: 759, or an allelic variant thereof;
   [1037] the portion of exon 14 of SLC4A4 is or comprises SEQ ID NO: 763, or an allelic variant thereof;
   [1038] a portion of exon 4 of SDC4 is or comprises SEQ ID NO: 822, or an allelic variant thereof;
   [1039] the portion of exon 12 of ZFAT is or comprises SEQ ID NO: 826, or an allelic variant thereof,
   [1040] the portion of exon 3 of DSCAML1 is or comprises SEQ ID NO: 866, or an allelic variant thereof; and
   [1041] the portion of exon 1 of NRG1 is or comprises SEQ ID NO: 604, or an allelic variant thereof.

[1042] 20. The polynucleotide according to any one of clauses 13-18, wherein:
[1043] the fusion of VAPB with NRG1 comprises a fusion junction between exon 1 of VAPB and exon 2 of NRG1, preferably the junction between the nucleic acids at position 43 of VAPB and at position 44 of NRG1 of SEQ ID NO: 3;
[1044] the fusion of CADM1 with NRG1 comprises a fusion junction between exon 7 of CADM1 and exon 6 of NRG1, preferably the junction between the nucleic acids at position 53 of CADM1 and at position 54 of NRG1 of SEQ ID NO: 7;
[1045] the fusion of CD44 with NRG1 comprises a fusion junction between exon 5 of CD44 and exon 2 of NRG1, preferably the junction between the nucleic acids at position 52 of CD44 and at position 53 of NRG1 of SEQ ID NO: 11;
[1046] the fusion of SLC3A2 with NRG1 comprises a fusion junction between exon 1 of SLC3A2 and exon 5 of NRG1, preferably the junction between the nucleic acids at position 53 of SLC3A2 and at position 54 of NRG1 of SEQ ID NO: 15;
[1047] the fusion of VTCN1 with NRG1 comprises a fusion junction between exon 2 of VTCN1 and exon 2 of NRG1, preferably the junction between the nucleic acids at position 65 of VTCN1 and at position 66 of NRG1 of SEQ ID NO: 166;
[1048] the fusion of CDH1 with NRG1 comprises a fusion junction between exon 11 of CDH1 and exon 2 of NRG1, preferably the junction between the nucleic acids at position 119 of CDH1 and at position 120 of NRG1 of SEQ ID NO: 186
[1049] the fusion of CXADR with NRG1 comprises a fusion junction between exon 1 of CXADR and exon 2 of NRG1, preferably the junction between the nucleic acids at position 43 of CXADR and at position 44 of NRG1 of SEQ ID NO: 217;
[1050] the fusion of GTF2E2 with NRG1 comprises a fusion junction between exon 2 of GTF2E2 and exon 2 of NRG1, preferably the junction between the nucleic acids at position 141 of GTF2E2 and at position 142 of NRG1 of SEQ ID NO: 233;
[1051] the fusion of CSMD1 with NRG1 comprises a fusion junction between exon 23 of CSMD1 and exon 6 of NRG1, preferably the junction between the nucleic acids at position 88 of CSMD1 and at position 89 of NRG1 of SEQ ID NO: 255;
[1052] the fusion of PTN with NRG1 comprises a fusion junction between exon 4 of PTN and exon 2 of NRG1, preferably the junction between the nucleic acids at position 102 of PTN and at position 103 of NRG1 of SEQ ID NO: 313;
[1053] the fusion of ST14 with NRG1 comprises a fusion junction between exon 11 of ST14 and exon 6 of NRG1, preferably the junction between the nucleic acids at position 95 of ST14 and at position 96 of NRG1 of SEQ ID NO: 330;
[1054] the fusion of THBS1 with NRG1 comprises a fusion junction between exon 9 of THBS1 and exon 6 of NRG1, preferably the junction between the nucleic acids at position 56 of THBS1 and at position 57 of NRG1 of SEQ ID NO: 376;
[1055] the fusion of AGRN with NRG1 comprises a fusion junction between exon 12 of AGRN and exon 6 of NRG1, preferably the junction between the nucleic acids at position 106 of AGRN and at position 107 of NRG1 of SEQ ID NO: 403;
[1056] the fusion of PVALB with NRG1 comprises a fusion junction between exon 4 of PVALB and exon 6 of NRG1, preferably the junction between the nucleic acids at position 102 of PVALB and at position 103 of NRG1 of SEQ ID NO: 437;
[1057] the fusion of SLC3A2 with NRG1 comprises a fusion junction between exon 2 of SLC3A2 and exon 6 of NRG1, preferably the junction between the nucleic acids at position 93 of SLC3A2 and at position 94 of NRG1 of SEQ ID NO: 454;
[1058] the fusion of APP with NRG1 comprises a fusion junction between exon 14 of APP and exon 6 of NRG1, preferably the junction between the nucleic acids at position 54 of APP and at position 55 of NRG1 of SEQ ID NO: 486;
[1059] the fusion of WRN with NRG1 comprises a fusion junction between exon 33 of WRN and exon 6 of NRG1, preferably the junction between the nucleic acids at position 96 of WRN and at position 97 of NRG1 of SEQ ID NO: 528;
[1060] the fusion of DAAM1 with NRG1 comprises a fusion junction between exon 1 of DAAM1 and exon 1 of NRG1, preferably the junction between the nucleic acids at position 75 of DAAM1 and at position 76 of NRG1 of SEQ ID NO: 605;
[1061] the fusion of ASPH with NRG1 comprises a fusion junction between exon 22 of ASPH and exon 2 of NRG1, preferably the junction between the nucleic acids at position 75 of ASPH and at position 76 of NRG1 of SEQ ID NO: 635;
[1062] the fusion of NOTCH2 with NRG1 comprises a fusion junction between exon 6 of NOTCH2 and exon 6 of NRG1, preferably the junction between the nucleic acids at position 75 of NOTCH2 and at position 76 of NRG1 of SEQ ID NO: 693;
[1063] the fusion of CD74 with NRG1 comprises a fusion junction between exon 2 of CD74 and exon 2 of NRG1, preferably the junction between the nucleic acids at position 75 of CD74 and at position 76 of NRG1 of SEQ ID NO: 717;
[1064] the fusion of SDC4 with NRG1 comprises a fusion junction between exon 2 of SDC4 and exon 2 of NRG1, preferably the junction between the nucleic acids at position 75 of SDC4 and at position 76 of NRG1 of SEQ ID NO: 743;
[1065] the fusion of CD44 with NRG1 comprises a fusion junction between exon 5 of CD44 and exon 6 of NRG1, preferably the junction between the nucleic acids at position 75 of CD44 and at position 76 of NRG1 of SEQ ID NO: 761;
[1066] the fusion of SLC4A4 with NRG1 comprises a fusion junction between exon 14 of SLC4A4 and exon 6 of NRG1, preferably the junction between the nucleic acids at position 75 of SLC4A4 and at position 76 of NRG1 of SEQ ID NO: 765;
[1067] the fusion of SDC4 with NRG1 comprises a fusion junction between exon 4 of SDC4 and exon 2 of NRG1, preferably the junction between the nucleic acids at position 75 of SDC4 and at position 76 of NRG1 of SEQ ID NO: 824;
[1068] the fusion of ZFAT with NRG1 comprises a fusion junction between exon 12 of ZFAT and exon 6 of NRG1, preferably the junction between the nucleic acids at position 75 of ZFAT and at position 76 of NRG1 of SEQ ID NO: 828; and
[1069] the fusion of DSCAML1 with NRG1 comprises a fusion junction between exon 3 of DSCAML1 and exon 2 of NRG1, preferably the junction between the nucleic acids at position 75 of DSCAML1 and at position 76 of NRG1 of SEQ ID NO: 868.

[1070] 21. The polynucleotide according to any one of the previous clauses, wherein the polynucleotide is isolated or purified.

[1071] 22. The polynucleotide according to any one of the previous clauses, wherein any one of the fusions is an in-frame fusion.

[1072] 23. The polynucleotide according to any one of the previous clauses, wherein the polynucleotide is a mammalian polynucleotide, preferably a human polynucleotide.

[1073] 24. A polypeptide fusion encoded by the polynucleotide according to any one of the previous clauses.

[1074] 25. A vector comprising the polynucleotide according to any one of clauses 1-23.

[1075] 26. A recombinant host cell comprising the polynucleotide of any of clauses 1-23 or the vector of clause 25.

[1076] 27. A method of making the polypeptide fusion of clause 24, comprising maintaining the host cell of clause 26 under conditions suitable for expression of the polynucleotide comprised by the host cell, whereby the polynucleotide is expressed and a polypeptide fusion is produced, followed by isolating or purifying the polypeptide fusion.

[1077] 28. A method for making a recombinant host cell comprising introducing the vector of clause 25 into a host cell.

[1078] 29. A detection assay comprising a nucleic acid probe, primer or primer pair for detection of the presence of a polynucleotide fusion according to any one of clauses 1-23.

[1079] 30. A nucleic acid probe, primer or primer pair for detection of a polynucleotide fusion according to any of the clauses 1-23.

[1080] 31. The nucleic acid probe, primer or primer pair of clause 30, having a length of 10-40 nucleotides.

[1081] 32. The nucleic acid probe, primer or primer pair of clauses 30 or 31, wherein the fusion as detected comprises:
[1082] the fusion of VAPB with NRG1 comprising or consisting of SEQ ID NO: 3, and preferably includes the nucleic acids at position 43 and 44;
[1083] the fusion of CADM1 with NRG1 comprising or consisting of SEQ ID NO: 7, and preferably includes the nucleic acids at position 53 and 54;
[1084] the fusion of CD44 with NRG1 comprising or consisting of SEQ ID NO: 11, and preferably includes the nucleic acids at position 52 and 53;
[1085] the fusion of SLC3A2 with NRG1 comprising or consisting of SEQ ID NO: 15, and preferably includes the nucleic acids at position 53 and 54;
[1086] the fusion of VTCN1 with NRG1 comprising or consisting of SEQ ID NO: 166, and preferably includes the nucleic acids at position 65 and 66;
[1087] the fusion of CDH1 with NRG1 comprising or consisting of SEQ ID NO: 186, and preferably includes the nucleic acids at position 119 and 120;
[1088] the fusion of CXADR with NRG1 comprising or consisting of SEQ ID NO: 217, and preferably includes the nucleic acids at position 43 and 44;
[1089] the fusion of GTF2E2 with NRG1 comprising or consisting of SEQ ID NO: 233, and preferably includes the nucleic acids at position 141 and 142;
[1090] the fusion of CSMD1 with NRG1 comprising or consisting of SEQ ID NO: 255, and preferably includes the nucleic acids at position 88 and 89;
[1091] the fusion of PTN with NRG1 comprising or consisting of SEQ ID NO: 313, and preferably includes the nucleic acids at position 102 and 103;
[1092] the fusion of ST14 with NRG1 comprising or consisting of SEQ ID NO: 330, and preferably includes the nucleic acids at position 95 and 96;
[1093] the fusion of THBS1 with NRG1 comprising or consisting of SEQ ID NO: 376, and preferably includes the nucleic acids at position 56 and 57;
[1094] the fusion of AGRN with NRG1 comprising or consisting of SEQ ID NO: 403, and preferably includes the nucleic acids at position 106 and 107;
[1095] the fusion of PVALB with NRG1 comprising or consisting of SEQ ID NO: 437, and preferably includes the nucleic acids at position 102 and 103,
[1096] the fusion of SLC3A2 with NRG1 comprising or consisting of SEQ ID NO: 454, and preferably includes the nucleic acids at position 93 and 94;
[1097] the fusion of APP with NRG1 comprising or consisting of SEQ ID NO: 486, and preferably includes the nucleic acids at position 54 and 55;
[1098] the fusion of WRN with NRG1 comprising or consisting of SEQ ID NO: 528, and preferably includes the nucleic acids at position 96 and 97;
[1099] the fusion of DAAM1 with NRG1 comprising or consisting of SEQ ID NO: 605, and preferably includes the nucleic acids at position 75 and 76;
[1100] the fusion of ASPH with NRG1 comprising or consisting of SEQ ID NO: 635, and preferably includes the nucleic acids at position 75 and 76;
[1101] the fusion of NOTCH2 with NRG1 comprising or consisting of SEQ ID NO: 693, and preferably includes the nucleic acids at position 75 and 76;
[1102] the fusion of CD74 with NRG1 comprising or consisting of SEQ ID NO: 717, and preferably includes the nucleic acids at position 75 and 76;
[1103] the fusion of SDC4 with NRG1 comprising or consisting of SEQ ID NO: 743, and preferably includes the nucleic acids at position 75 and 76;
[1104] the fusion of CD44 with NRG1 comprising or consisting of SEQ ID NO: 761, and preferably includes the nucleic acids at position 75 and 76;
[1105] the fusion of SLC4A4 with NRG1 comprising or consisting of SEQ ID NO: 765, and preferably includes the nucleic acids at position 75 and 76;
[1106] the fusion of SDC4 with NRG1 comprising or consisting of SEQ ID NO: 824, and preferably includes the nucleic acids at position 75 and 76;
[1107] the fusion of ZFAT with NRG1 comprising or consisting of SEQ ID NO: 828, and preferably includes the nucleic acids at position 75 and 76; and
[1108] the fusion of DSCAML1 with NRG1 comprising or consisting of SEQ ID NO: 868, and preferably includes the nucleic acids at position 75 and 76.

[1109] 33. The nucleic acid probe, primer or primer pair of any one of clauses 30-32, wherein:
[1110] the probe, primer or primer pair for detection of the fusion of VAPB with NRG1 specifically hybridizes to, or has 95% or more complementary sequence identity with, a sequence comprised by exon 1 from VAPB or a sequence located 5′ of exon 1 and/or to a sequence comprised by exon 2 from NRG1, or a sequence located 3′ of exon 2;
[1111] the probe, primer or primer pair for detection of the fusion of CADM1 with NRG1 specifically hybridizes to, or has 95% or more complementary sequence identity with, a sequence comprised by exon 7 from CADM1, or a sequence located 5′ of exon 7 and/or to a sequence comprised by exon 6 from NRG1, or a sequence located 3′ of exon 6;
[1112] the probe, primer or primer pair for detection of the fusion of CD44 with NRG1 specifically hybridizes to, or has 95% or more complementary sequence identity with, a sequence comprised by exon 5 from CD44, or a sequence located 5′ of exon 5 and/or to a sequence comprised by exon 2 from NRG1, or a sequence located 3′ of exon 2;
[1113] the probe, primer or primer pair for detection of the fusion of transcript version 6 of SLC3A2 with NRG1 specifically hybridizes to, or has 95% or more complementary sequence identity with, a sequence comprised by exon 1 from said SLC3A2 or a sequence located 5′ of exon 1 and/or to a sequence comprised by exon 5 from NRG1, or a sequence located 3′ of exon 5;
[1114] the probe, primer or primer pair for detection of the fusion of VTCN1 with NRG1 specifically hybridizes to, or has 95% or more complementary sequence identity with, a sequence comprised by exon 2 from VTCN1, or a sequence located 5′ of exon 2 and/or to a sequence comprised by exon 2 from NRG1, or a sequence located 3′ of exon 2;
[1115] the probe, primer or primer pair for detection of the fusion of CDH1 with NRG1 specifically hybridizes to, or has 95% or more complementary sequence identity with, a sequence comprised by exon 11 from CDH1, or a sequence located 5′ of exon 11 and/or to a sequence comprised by exon 2 from NRG1, or a sequence located 3′ of exon 2;
   [1116] the probe, primer or primer pair for detection of the fusion of CXADR with NRG1 specifically hybridizes to, or has 95% or more complementary sequence identity with, a sequence comprised by exon 1 from CXADR, or a sequence located 5′ of exon 1 and/or to a sequence comprised by exon 2 from NRG1, or a sequence located 3′ of exon 2;
   [1117] the probe, primer or primer pair for detection of the fusion of GTF2E2 with NRG1 specifically hybridizes to, or has 95% or more complementary sequence identity with, a sequence comprised by exon 2 from GTF2E2, or a sequence located 5′ of exon 2 and/or to a sequence comprised by exon 2 from NRG1, or a sequence located 3′ of exon 2;
   [1118] the probe, primer or primer pair for detection of the fusion of CSMD1 with NRG1 specifically hybridizes to, or has 95% or more complementary sequence identity with, a sequence comprised by exon 23 from CSMD1, or a sequence located 5′ of exon 23 and/or to a sequence comprised by exon 6 from NRG1, or a sequence located 3′ of exon 6;
   [1119] the probe, primer or primer pair for detection of the fusion of PTN with NRG1 specifically hybridizes to, or has 95% or more complementary sequence identity with, a sequence comprised by exon 4 from PTN, or a sequence located 5′ of exon 4 and/or to a sequence comprised by exon 2 from NRG1, or a sequence located 3′ of exon 2;
   [1120] the probe, primer or primer pair for detection of the fusion of ST14 with NRG1 specifically hybridizes to, or has 95% or more complementary sequence identity with, a sequence comprised by exon 11 from ST14, or a sequence located 5′ of exon 11 and/or to a sequence comprised by exon 6 from NRG1, or a sequence located 3′ of exon 6;
   [1121] the probe, primer or primer pair for detection of the fusion of THBS1 with NRG1 specifically hybridizes to, or has 95% or more complementary sequence identity with, a sequence comprised by exon 9 from THBS1, or a sequence located 5′ of exon 9 and/or to a sequence comprised by exon 6 from NRG1, or a sequence located 3′ of exon 6;
   [1122] the probe, primer or primer pair for detection of the fusion of AGRN with NRG1 specifically hybridizes to, or has 95% or more complementary sequence identity with, a sequence comprised by exon 12 from AGRN, or a sequence located 5′ of exon 12 and/or to a sequence comprised by exon 6 from NRG1, or a sequence located 3′ of exon 6;
   [1123] the probe, primer or primer pair for detection of the fusion of PVALB with NRG1 specifically hybridizes to, or has 95% or more complementary sequence identity with, a sequence comprised by exon 4 from PVALB, or a sequence located 5′ of exon 4 and/or to a sequence comprised by exon 6 from NRG1, or a sequence located 3′ of exon 6;
   [1124] the probe, primer or primer pair for detection of the fusion of transcript version 3 of SLC3A2 with NRG1 specifically hybridizes to, or has 95% or more complementary sequence identity with, a sequence comprised by exon 2 from said SLC3A2, or a sequence located 5′ of exon 2 and/or to a sequence comprised by exon 6 from NRG1, or a sequence located 3′ of exon 6;
   [1125] the probe, primer or primer pair for detection of the fusion of APP with NRG1 specifically hybridizes to, or has 95% or more complementary sequence identity with, a sequence comprised by exon 14 from APP, or a sequence located 5′ of exon 14 and/or to a sequence comprised by exon 6 from NRG1, or a sequence located 3′ of exon 6;
   [1126] the probe, primer or primer pair for detection of the fusion of WRN with NRG1 specifically hybridizes to, or has 95% or more complementary sequence identity with, a sequence comprised by exon 33 from WRN, or a sequence located 5′ of exon 33 and/or to a sequence comprised by exon 6 from NRG1, or a sequence located 3′ of exon 6;
   [1127] the probe, primer or primer pair for detection of the fusion of DAAM1 with NRG1 specifically hybridizes to, or has 95% or more complementary sequence identity with, a sequence comprised by exon 1 from DAAM1, or a sequence located 5′ of exon 1 and/or to a sequence comprised by exon 1 from NRG1, or a sequence located 3′ of exon 1;
   [1128] the probe, primer or primer pair for detection of the fusion of ASPH with NRG1 specifically hybridizes to, or has 95% or more complementary sequence identity with, a sequence comprised by exon 22 from ASPH, or a sequence located 5′ of exon 22 and/or to a sequence comprised by exon 2 from NRG1, or a sequence located 3′ of exon 2;
   [1129] the probe, primer or primer pair for detection of the fusion of NOTCH2 with NRG1 specifically hybridizes to, or has 95% or more complementary sequence identity with, a sequence comprised by exon 6 from NOTCH2, or a sequence located 5′ of exon 6 and/or to a sequence comprised by exon 6 from NRG1, or a sequence located 3′ of exon 6;
   [1130] the probe, primer or primer pair for detection of the fusion of CD74 with NRG1 specifically hybridizes to, or has 95% or more complementary sequence identity with, a sequence comprised by exon 2 from CD74, or a sequence located 5′ of exon 2 and/or to a sequence comprised by exon 2 from NRG1, or a sequence located 3′ of exon 2;
   [1131] the probe, primer or primer pair for detection of the fusion of SDC4 with NRG1 specifically hybridizes to, or has 95% or more complementary sequence identity with, a sequence comprised by exon 2 from SDC4, or a sequence located 5′ of exon 2 and/or to a sequence comprised by exon 2 from NRG1, or a sequence located 3′ of exon 2;
   [1132] the probe, primer or primer pair for detection of the fusion of CD44 with NRG1 specifically hybridizes to, or has 95% or more complementary sequence identity with, a sequence comprised by exon 5 from CD44, or a sequence located 5′ of exon 5 and/or to a sequence comprised by exon 6 from NRG1, or a sequence located 3′ of exon 6;
   [1133] the probe, primer or primer pair for detection of the fusion of SLC4A4 with NRG1 specifically hybridizes to, or has 95% or more complementary sequence identity with, a sequence comprised by exon 14 from SLC4A4, or a sequence located 5′ of exon 14 and/or to a sequence comprised by exon 6 from NRG1, or a sequence located 3′ of exon 6;
   [1134] the probe, primer or primer pair for detection of the fusion of SDC4 with NRG1 specifically hybridizes to, or has 95% or more complementary sequence identity with, a sequence comprised by exon 4 from SDC4, or a sequence located 5′ of exon 4 and/or to a sequence comprised by exon 2 from NRG1, or a sequence located 3′ of exon 2;
   [1135] the probe, primer or primer pair for detection of the fusion of ZFAT with NRG1 specifically hybridizes to, or has 95% or more complementary sequence identity with, a sequence comprised by exon 12 from ZFAT, or a sequence located 5′ of exon 12 and/or to a sequence comprised by exon 6 from NRG1, or a sequence located 3′ of exon 6; or
   [1136] the probe, primer or primer pair for detection of the fusion of DSCAML1 with NRG1 specifically hybridizes to, or has 95% or more complementary sequence identity with, a sequence comprised by exon 3 from DSCAML1, or a sequence located 5′ of exon 3 and/or to a sequence comprised by exon 2 from NRG1, or a sequence located 3′ of exon 2.

[1137] 34. The nucleic acid probe, primer or primer pair of clause 33, wherein:
[1138] exon 1 from VAPB comprises or consists of SEQ ID NO: 17 or an allelic variant thereof;
[1139] exon 7 from CADM1 comprises or consists of SEQ ID NO: 39 or an allelic variant thereof;
[1140] exon 5 from CD44 comprises or consists of SEQ ID NO: 65 or an allelic variant thereof;
[1141] exon 1 from SLC3A2 comprises or consists of SEQ ID NO: 103 or an allelic variant thereof;
[1142] exon 2 from VTCN1 comprises or consists of SEQ ID NO: 169 or an allelic variant thereof;
[1143] exon 11 from CDH1 comprises or consists of SEQ ID NO: 198 or an allelic variant thereof;
[1144] exon 1 from CXADR comprises or consists of SEQ ID NO: 219 or an allelic variant thereof;
[1145] exon 2 from GTF2E2 comprises or consists of SEQ ID NO: 236 or an allelic variant thereof;
[1146] exon 23 from CSMD1 comprises or consists of SEQ ID NO: 279 or an allelic variant thereof;
[1147] exon 4 from PTN comprises or consists of SEQ ID NO: 318 or an allelic variant thereof;
[1148] exon 11 from ST14 comprises or consists of SEQ ID NO: 342 or an allelic variant thereof;
[1149] exon 9 from THBS1 comprises or consists of SEQ ID NO: 386 or an allelic variant thereof;
[1150] exon 12 from AGRN comprises or consists of SEQ ID NO: 416 or an allelic variant thereof;
[1151] exon 4 from PVALB comprises or consists of SEQ ID NO: 442 or an allelic variant thereof;
[1152] exon 2 from SLC3A2 comprises or consists of SEQ ID NO: 457 or an allelic variant thereof;
[1153] exon 14 from APP comprises or consists of SEQ ID NO: 501 or an allelic variant thereof;
[1154] exon 33 from WRN comprises or consists of SEQ ID NO: 562 or an allelic variant thereof;
[1155] exon 1 from DAAM1 comprises or consists of SEQ ID NO: 606 or an allelic variant thereof;
[1156] exon 22 from ASPH comprises or consists of SEQ ID NO: 658 or an allelic variant thereof;
[1157] exon 6 from NOTCH2 comprises or consists of SEQ ID NO: 700 or an allelic variant thereof;
[1158] exon 2 from CD74 comprises or consists of SEQ ID NO: 720 or an allelic variant thereof;
[1159] exon 2 from SDC4 comprises or consists of SEQ ID NO: 746 or an allelic variant thereof;
[1160] exon 5 from CD44 comprises or consists of SEQ ID NO: 65 or an allelic variant thereof;
[1161] exon 14 from SLC4A4 comprises or consists of SEQ ID NO: 780 or an allelic variant thereof;
[1162] exon 4 from SDC4 comprises or consists of SEQ ID NO: 748 or an allelic variant thereof;
[1163] exon 12 from ZFAT comprises or consists of SEQ ID NO: 841 or an allelic variant thereof;
[1164] exon 3 from DSCAML1 comprises or consists of SEQ ID NO: 872 or an allelic variant thereof and
[1165] exons 1, 2, 5 and 6 from NRG1 comprise or consist of SEQ ID NO: 125, 126, 129 and 130, respectively, or an allelic variant thereof.

[1166] 35. The nucleic acid probe, primer or primer pair of clause 33, wherein:
[1167] the probe, primer or primer pair for detection of the fusion of VAPB with NRG1 specifically hybridizes to, or has 95% or more complementary sequence identity with, a sequence comprised by SEQ ID NO: 17, or to an allelic variant thereof, and/or to a sequence comprised by SEQ ID NO: 153;
[1168] the probe, primer or primer pair for detection of the fusion of CADM1 with NRG1 specifically hybridizes to, or has 95% or more complementary sequence identity with, a sequence comprised by SEQ ID NO: 57 and/or to a sequence comprised by SEQ ID NO: 155;
[1169] the probe, primer or primer pair for detection of the fusion of CD44 with NRG1 specifically hybridizes to, or has 95% or more complementary sequence identity with, a sequence comprised by SEQ ID NO: 99 and/or to a sequence comprised by SEQ ID NO: 153;
[1170] the probe, primer or primer pair for detection of the fusion of SLC3A2 with NRG1 specifically hybridizes to, or has 95% or more complementary sequence identity with, a sequence comprised by SEQ ID NO: 103 and/or to a sequence comprised by SEQ ID NO: 157;
[1171] the probe, primer or primer pair for detection of the fusion of VTCN1 with NRG1 specifically hybridizes to, or has 95% or more complementary sequence identity with, a sequence comprised by SEQ ID NO: 181 and/or to a sequence comprised by SEQ ID NO: 153;
[1172] the probe, primer or primer pair for detection of the fusion of CDH1 with NRG1 specifically hybridizes to, or has 95% or more complementary sequence identity with, a sequence comprised by SEQ ID NO: 213 and/or to a sequence comprised by SEQ ID NO: 153;
[1173] the probe, primer or primer pair for detection of the fusion of CXADR with NRG1 specifically hybridizes to, or has 95% or more complementary sequence identity with, a sequence comprised by SEQ ID NO: 219 and/or to a sequence comprised by SEQ ID NO: 153;
[1174] the probe, primer or primer pair for detection of the fusion of GTF2E2 with NRG1 specifically hybridizes to, or has 95% or more complementary sequence identity with, a sequence comprised by SEQ ID NO: 252 and/or to a sequence comprised by SEQ ID NO: 153;
[1175] the probe, primer or primer pair for detection of the fusion of CSMD1 with NRG1 specifically hybridizes to, or has 95% or more complementary sequence identity with, a sequence comprised by SEQ ID NO: 309 and/or to a sequence comprised by SEQ ID NO: 155;
[1176] the probe, primer or primer pair for detection of the fusion of PTN with NRG1 specifically hybridizes to, or has 95% or more complementary sequence identity with, a sequence comprised by SEQ ID NO: 326 and/or to a sequence comprised by SEQ ID NO: 153;
[1177] the probe, primer or primer pair for detection of the fusion of ST14 with NRG1 specifically hybridizes to, or has 95% or more complementary sequence identity with, a sequence comprised by SEQ ID NO: 372 and/or to a sequence comprised by SEQ ID NO: 155;
[1178] the probe, primer or primer pair for detection of the fusion of THBS1 with NRG1 specifically hybridizes to, or has 95% or more complementary sequence identity with, a sequence comprised by SEQ ID NO: 399 and/or to a sequence comprised by SEQ ID NO: 155;
[1179] the probe, primer or primer pair for detection of the fusion of AGRN with NRG1 specifically hybridizes to, or has 95% or more complementary sequence identity with, a sequence comprised by SEQ ID NO: 433 and/or to a sequence comprised by SEQ ID NO: 155;
[1180] the probe, primer or primer pair for detection of the fusion of PVALB with NRG1 specifically hybridizes to, or has 95% or more complementary sequence identity with, a sequence comprised by SEQ ID NO: 450 and/or to a sequence comprised by SEQ ID NO: 155;
[1181] the probe, primer or primer pair for detection of the fusion of SLC3A2 with NRG1 specifically hybridizes to, or has 95% or more complementary sequence identity with, a sequence comprised by SEQ ID NO: 482 and/or to a sequence comprised by SEQ ID NO: 155;
[1182] the probe, primer or primer pair for detection of the fusion of APP with NRG1 specifically hybridizes to, or has 95% or more complementary sequence identity with, a sequence comprised by SEQ ID NO: 524 and/or to a sequence comprised by SEQ ID NO: 155;
[1183] the probe, primer or primer pair for detection of the fusion of WRN with NRG1 specifically hybridizes to, or has 95% or more complementary sequence identity with, a sequence comprised by SEQ ID NO: 601 and/or to a sequence comprised by SEQ ID NO: 155;
[1184] the probe, primer or primer pair for detection of the fusion of DAAM1 with NRG1 specifically hybridizes to, or has 95% or more complementary sequence identity with, a sequence comprised by SEQ ID NO: 606 and/or to a sequence comprised by SEQ ID NO: 138;
[1185] the probe, primer or primer pair for detection of the fusion of ASPH with NRG1 specifically hybridizes to, or has 95% or more complementary sequence identity with, a sequence comprised by SEQ ID NO: 689 and/or to a sequence comprised by SEQ ID NO: 153;
[1186] the probe, primer or primer pair for detection of the fusion of NOTCH2 with NRG1 specifically hybridizes to, or has 95% or more complementary sequence identity with, a sequence comprised by SEQ ID NO: 713 and/or to a sequence comprised by SEQ ID NO: 155;
[1187] the probe, primer or primer pair for detection of the fusion of CD74 with NRG1 specifically hybridizes to, or has 95% or more complementary sequence identity with, a sequence comprised by SEQ ID NO: 739 and/or to a sequence comprised by SEQ ID NO: 153;
[1188] the probe, primer or primer pair for detection of the fusion of SDC4 with NRG1 specifically hybridizes to, or has 95% or more complementary sequence identity with, a sequence comprised by SEQ ID NO: 757 and/or to a sequence comprised by SEQ ID NO: 153;
[1189] the probe, primer or primer pair for detection of the fusion of CD44 with NRG1 specifically hybridizes to, or has 95% or more complementary sequence identity with, a sequence comprised by SEQ ID NO: 99 and/or to a sequence comprised by SEQ ID NO: 155;
[1190] the probe, primer or primer pair for detection of the fusion of SLC4A4 with NRG1 specifically hybridizes to, or has 95% or more complementary sequence identity with, a sequence comprised by SEQ ID NO: 820 and/or to a sequence comprised by SEQ ID NO: 155;
[1191] the probe, primer or primer pair for detection of the fusion of SDC4 with NRG1 specifically hybridizes to, or has 95% or more complementary sequence identity with, a sequence comprised by SEQ ID NO: 940 and/or to a sequence comprised by SEQ ID NO: 153;
[1192] the probe, primer or primer pair for detection of the fusion of ZFAT with NRG1 specifically hybridizes to, or has 95% or more complementary sequence identity with, a sequence comprised by SEQ ID NO: 864 and/or to a sequence comprised by SEQ ID NO: 155; and
[1193] the probe, primer or primer pair for detection of the fusion of DSCAML1 with NRG1 specifically hybridizes to, or has 95% or more complementary sequence identity with, a sequence comprised by SEQ ID NO: 938 and/or to a sequence comprised by SEQ ID NO: 153.

[1194] 36. A first and a second nucleic acid probe for use in an in-situ hybridization assay to detect a polynucleotide fusion of any one of clauses 1-23,
[1195] wherein the first probe specifically hybridizes to a VAPB sequence which is located 5′ from the nucleic acid of position 43 of SEQ ID NO: 3, and the second probe specifically hybridizes to a NRG1 sequence which is located 3′ from the nucleic acid of position 44 of SEQ ID NO: 3;
[1196] wherein the first probe specifically hybridizes to a CADM1 sequence which is located 5′ from the nucleic acid of position 53 of SEQ ID NO: 7, and the second probe specifically hybridizes to a NRG1 sequence which is located 3′ from the nucleic acid of position 54 of SEQ ID NO: 7;
[1197] wherein the first probe specifically hybridizes to a CD44 sequence which is located 5′ from the nucleic acid of position 52 of SEQ ID NO: 11, and the second probe specifically hybridizes to a NRG1 sequence which is located 3′ from the nucleic acid of position 53 of SEQ ID NO: 11;
[1198] wherein the first probe specifically hybridizes to a SLC3A2 sequence which is located 5′ from the nucleic acid of position 53 of SEQ ID NO: 15, and the second probe specifically hybridizes to a NRG1 sequence which is located 3′ from the nucleic acid of position 54 of SEQ ID NO: 15;
[1199] wherein the first probe specifically hybridizes to a VTCN1 sequence which is located 5′ from the nucleic acid of position 65 of SEQ ID NO: 166, and the second probe specifically hybridizes to a NRG1 sequence which is located 3′ from the nucleic acid of position 66 of SEQ ID NO: 166;
[1200] wherein the first probe specifically hybridizes to a CDH1 sequence which is located 5′ from the nucleic acid of position 119 of SEQ ID NO: 186, and the second probe specifically hybridizes to a NRG1 sequence which is located 3′ from the nucleic acid of position 120 of SEQ ID NO: 186;
[1201] wherein the first probe specifically hybridizes to a CXADR sequence which is located 5′ from the nucleic acid of position 43 of SEQ ID NO: 217, and the second probe specifically hybridizes to a NRG1 sequence which is located 3′ from the nucleic acid of position 44 of SEQ ID NO: 217;
[1202] wherein the first probe specifically hybridizes to a GTF2E2 sequence which is located 5′ from the nucleic acid of position 141 of SEQ ID NO: 233, and the second probe specifically hybridizes to a NRG1 sequence which is located 3′ from the nucleic acid of position 142 of SEQ ID NO: 233;
[1203] wherein the first probe specifically hybridizes to a CSMD1 sequence which is located 5′ from the nucleic acid of position 88 of SEQ ID NO: 255, and the second probe specifically hybridizes to a NRG1 sequence which is located 3′ from the nucleic acid of position 89 of SEQ ID NO: 255;
[1204] wherein the first probe specifically hybridizes to a PTN sequence which is located 5′ from the nucleic acid of position 102 of SEQ ID NO: 313, and the second probe specifically hybridizes to a NRG1 sequence which is located 3′ from the nucleic acid of position 103 of SEQ ID NO: 313;
[1205] wherein the first probe specifically hybridizes to a ST14 sequence which is located 5′ from the nucleic acid of position 95 of SEQ ID NO: 330, and the second probe specifically hybridizes to a NRG1 sequence which is located 3′ from the nucleic acid of position 96 of SEQ ID NO: 330;
[1206] wherein the first probe specifically hybridizes to a THBS1 sequence which is located 5′ from the nucleic acid of position 56 of SEQ ID NO: 376, and the second probe specifically hybridizes to a NRG1 sequence which is located 3′ from the nucleic acid of position 57 of SEQ ID NO: 376;
[1207] wherein the first probe specifically hybridizes to a AGRN sequence which is located 5′ from the nucleic acid of position 106 of SEQ ID NO: 403, and the second probe specifically hybridizes to a NRG1 sequence which is located 3′ from the nucleic acid of position 107 of SEQ ID NO: 403;
[1208] wherein the first probe specifically hybridizes to a PVALB sequence which is located 5′ from the nucleic acid of position 102 of SEQ ID NO: 437, and the second probe specifically hybridizes to a NRG1 sequence which is located 3′ from the nucleic acid of position 103 of SEQ ID NO: 437;
[1209] wherein the first probe specifically hybridizes to a SLC3A2 sequence which is located 5′ from the nucleic acid of position 93 of SEQ ID NO: 454, and the second probe specifically hybridizes to a NRG1 sequence which is located 3′ from the nucleic acid of position 94 of SEQ ID NO: 454;
[1210] wherein the first probe specifically hybridizes to a APP sequence which is located 5′ from the nucleic acid of position 54 of SEQ ID NO: 486, and the second probe specifically hybridizes to a NRG1 sequence which is located 3′ from the nucleic acid of position 55 of SEQ ID NO: 486;
[1211] wherein the first probe specifically hybridizes to a WRN sequence which is located 5′ from the nucleic acid of position 96 of SEQ ID NO: 528, and the second probe specifically hybridizes to a NRG1 sequence which is located 3′ from the nucleic acid of position 97 of SEQ ID NO: 528;
[1212] wherein the first probe specifically hybridizes to a DAAM1 sequence which is located 5′ from the nucleic acid of position 75 of SEQ ID NO: 605, and the second probe specifically hybridizes to a NRG1 sequence which is located 3′ from the nucleic acid of position 76 of SEQ ID NO: 605;
[1213] wherein the first probe specifically hybridizes to a ASPH sequence which is located 5′ from the nucleic acid of position 75 of SEQ ID NO: 635, and the second probe specifically hybridizes to a NRG1 sequence which is located 3′ from the nucleic acid of position 76 of SEQ ID NO: 635;
[1214] wherein the first probe specifically hybridizes to a NOTCH2 sequence which is located 5′ from the nucleic acid of position 75 of SEQ ID NO: 693, and the second probe specifically hybridizes to a NRG1 sequence which is located 3′ from the nucleic acid of position 76 of SEQ ID NO: 693;
[1215] wherein the first probe specifically hybridizes to a CD74 sequence which is located 5′ from the nucleic acid of position 75 of SEQ ID NO: 717, and the second probe specifically hybridizes to a NRG1 sequence which is located 3′ from the nucleic acid of position 76 of SEQ ID NO: 717;
[1216] wherein the first probe specifically hybridizes to a SDC4 sequence which is located 5′ from the nucleic acid of position 75 of SEQ ID NO: 743, and the second probe specifically hybridizes to a NRG1 sequence which is located 3′ from the nucleic acid of position 76 of SEQ ID NO: 743;
[1217] wherein the first probe specifically hybridizes to a CD44 sequence which is located 5′ from the nucleic acid of position 75 of SEQ ID NO: 761, and the second probe specifically hybridizes to a NRG1 sequence which is located 3′ from the nucleic acid of position 76 of SEQ ID NO: 761;
[1218] wherein the first probe specifically hybridizes to a SLC4A4 sequence which is located 5′ from the nucleic acid of position 75 of SEQ ID NO: 765, and the second probe specifically hybridizes to a NRG1 sequence which is located 3′ from the nucleic acid of position 76 of SEQ ID NO: 765;
[1219] wherein the first probe specifically hybridizes to a SDC4 sequence which is located 5′ from the nucleic acid of position 75 of SEQ ID NO: 824, and the second probe specifically hybridizes to a NRG1 sequence which is located 3′ from the nucleic acid of position 76 of SEQ ID NO: 824;
[1220] wherein the first probe specifically hybridizes to a ZFAT sequence which is located 5′ from the nucleic acid of position 75 of SEQ ID NO: 828, and the second probe specifically hybridizes to a NRG1 sequence which is located 3′ from the nucleic acid of position 76 of SEQ ID NO: 828; or
[1221] wherein the first probe specifically hybridizes to a DSCAML1 sequence which is located 5′ from the nucleic acid of position 75 of SEQ ID NO: 868, and the second probe specifically hybridizes to a NRG1 sequence which is located 3′ from the nucleic acid of position 76 of SEQ ID NO: 868.

[1222] 37. A first antibody or a set of a first and a second antibody pair for detection of a polypeptide encoded by a polynucleotide fusion according to any of the clauses 1-23.

[1223] 38. A detection assay comprising a first antibody or a set of a first and second antibodies for detection of the presence of a polypeptide encoded by a polynucleotide fusion according to any one of clauses 1-23, wherein the first antibody or set of a first and second antibodies preferably is the first antibody or a set of a first and second antibodies of clause 34.

[1224] 39. The first antibody or set of first and second antibodies of clause 38, or the detection assay according to clause 32, wherein the first antibody binds a polypeptide fusion selected from VAPB-NRG1, CADM1-NRG1, CD44-NRG1, SLC3A2-NRG1, CDH1-NRG1, CXADR-NRG1, GTF2E2-NRG1, CSMD1-NRG1, PTN-NRG1, ST14-NRG1, THBS1-NRG1, AGRN-NRG1, PVALB-NRG1, APP-NRG1, WRN-NRG1, ASPH-NRG1, NOTCH2-NRG1, CD74-NRG1, SDC4-NRG1, SLC4A4-NRG1, ZFAT-NRG1 or DSCAML1-NRG1 and the set of first and second antibodies binds VAPB and NRG1 or CADM1 and NRG1, or CD44 and NRG1, SLC3A2 and NRG1, CDH1 and NRG1, CXADR and NRG1, GTF2E2 and NRG1, CSMD1 and NRG1, PTN and NRG1, ST14 and NRG1, THBS1 and NRG1, AGRN and NRG1, PVALB and NRG1, APP and NRG1, WRN and NRG1, ASPH and NRG1, NOTCH2 and NRG1, CD74 and NRG1, SDC4 and NRG1, SLC4A4 and NRG1, ZFAT and NRG1, or DSCAML1 and NRG1 respectively.

[1225] 40. A method for identifying a polynucleotide fusion, or a polypeptide encoded therefrom, according to any one of the clauses 1-23 in a sample, said method comprising testing a sample obtained from a subject to detect the presence of the fusion in the sample.

[1226] 41. A method for detecting the presence of a polynucleotide fusion, or a polypeptide encoded therefrom, according to any one of the clauses 1-23 in a sample, said method comprising testing a sample obtained from a subject to detect the presence of the fusion in the sample.

[1227] 42. A method for establishing whether an aberrant cell from a subject comprises a fusion, or a polypeptide encoded therefrom, according to any one of clauses 1-23, said method comprising testing the polynucleotide or polypeptide contents of the aberrant cell obtained from the subject for the presence of the fusion in the sample.

[1228] 43. A method for identifying a subject as carrying a polynucleotide fusion, or a polypeptide encoded therefrom, according to any one of clauses 1-23, said method comprising testing a sample obtained from a subject to detect the presence of the fusion in the sample.

[1229] 44. The method of any one of clauses 37-40, wherein the testing comprises detecting the fusion by utilizing a binding agent that specifically binds the polynucleotide, such as the nucleic acid probe, primer or primer pair of clause 31-36, or a polypeptide encoded therefrom, or utilizing a binding agent that binds a polynucleotide that comprises the polynucleotide fusion.

[1230] 45. The method of any one of clauses 40-44, wherein the testing comprises amplifying or detecting a sequence that discriminates between the presence and absence of the polynucleotide fusion, or polypeptide encoded therefrom.

[1231] 46. The method of any one of clauses 41-45, wherein the polynucleotide fusion is obtained from an aberrant cell expressing a polynucleotide fusion that comprises an EGF-like domain of NRG1.

[1232] 47. The method of any one of clauses 40-46, wherein the method comprises a step of obtaining the sample from a subject, followed by a step of isolating the polynucleotide or polypeptide encoded therefrom, from the sample.

[1233] 48. The method of any one of clauses 40-47, wherein the method comprises a step of purifying or isolating the polynucleotide or polypeptide from the sample.

[1234] 49. The method of any one of clauses 40-48, wherein the binding agent is or comprises a primer, a primer pair, a probe or an antibody.

[1235] 50. The method of any one of clauses 40-49, wherein the testing is an ex vivo method, preferably an in vitro method.

[1236] 51. The method of any one of clauses 40-50, wherein the binding agent comprises or is associated with a detectable label.

[1237] 52. The method of any one of clauses 40-51, wherein the sample is a liquid biopsy sample or a solid sample, such as a formalin fixed paraffin embedded tissue (FFPE) sample.

[1238] 53. The method of any one of clauses 40-52, wherein the sample comprises blood, serum, plasma, pleural liquid, urine, semen, amniotic fluid or peritoneal fluid.

[1239] 54. The method of any one of clauses 40-53, wherein the sample comprises an aberrant cell, such as a tumor cell or a cancer cell, or the polynucleotide or polypeptide contents thereof.

[1240] 55. A method of treating a subject having an ErbB-2 and/or ErbB-3 positive cancer or tumor comprising a polynucleotide fusion and/or expressing a fusion polypeptide encoded therefrom, said method comprising administering to the subject an effective amount of an ErbB-2 and/or ErbB-3 targeting agent, wherein the fusion is a fusion according to any one of clauses 1-23.

[1241] 56. A method for inhibiting the progression in a subject of an ErbB-2 and ErbB-3 positive cancer or tumor comprising a polynucleotide fusion and/or expressing a fusion polypeptide encoded therefrom, said method comprising administering to the subject an effective amount of an ErbB-2 and/or ErbB-3 targeting agent, wherein said fusion is a fusion according to any one of clauses 1-23.

[1242] 57. An ErbB-2 and/or ErbB-3 targeting agent for use in the treatment of a subject that has an ErbB-2 and ErbB-3 positive cancer or tumor comprising a polynucleotide fusion and/or expressing a fusion polypeptide encoded therefrom, said treatment comprising administering an effective amount of the ErbB-2 and/or ErbB-3 targeting agent to the subject, wherein said fusion is a fusion according to any one of clauses 1-23.

[1243] 58. A method for diagnosing a subject for an aberrant cell that comprises a polynucleotide fusion, or polypeptide encoded therefrom according to any one of clauses 1-23, the method comprising testing a sample obtained from a subject to detect the presence of the fusion in the sample.

[1244] 59. The method of clause 58, wherein the testing comprises detecting the fusion by utilizing a binding agent that specifically binds the polynucleotide, such as the nucleic acid probe, primer or primer pair of any one of clauses 30-35, or a polypeptide encoded therefrom, or utilizing a binding agent that binds a polynucleotide that comprises the polynucleotide fusion.

[1245] 60. A method for assessing whether a subject suffers from a cancer or tumor or is prone to suffering from a cancer or tumor, the method comprising testing a sample obtained from a subject to detect the presence of a polynucleotide fusion, or polypeptide encoded therefrom according to any one of clauses 1-23 in the sample, and assessing that said subject suffers from said cancer or tumor or is prone to suffering from said cancer or tumor, by identifying the presence of said polynucleotide or polypeptide fusion.

[1246] 61. The method or use according to any one of clauses 55-58, wherein the ErbB-2 and/or ErbB-3 targeting agent is selected from the group consisting of a multispecific antibody comprising a first antigen-binding site that binds an extracellular part of ErbB-2 and a second antigen-binding site that binds an extracellular part of ErbB-3, a tyrosine kinase inhibitor of ErbB-2, a monospecific bivalent antibody comprising an antigen-binding site that bind an extracellular part of ErbB-2, a monospecific bivalent antibody comprising an antigen-binding site that bind an extracellular part of ErbB-3, or any combination thereof.

[1247] 62. The method or use according to any one of clauses 55-58, or 61, wherein the ErbB-2 and/or ErbB-3 targeting agent is zenocutuzumab.

[1248] 63. The method or use according to any one of clauses 41-62, wherein the aberrant cell, cancer cell or tumor cell comprises the polynucleotide fusion of clauses 1-23, or a polypeptide encoded thereby, and wherein the polynucleotide fusion comprised by the cell further comprises an in-frame fusion of a coding sequence that codes for EGF-like domain of NRG1.

[1249] 64. The method or use according to any one of clauses 41-63, wherein the aberrant cell is from a cancer, in particular said cancer is an adenocarcinoma, more in particular a mucinous adenocarcinoma, a pancreatic cancer, in particular a pancreatic adenocarcinoma, more in particular a pancreatic ductal adenocarcinoma, a renal cell carcinoma, a sarcoma, a bladder, a colon, a rectal, colorectal, a gallbladder, a head and neck cancer, a prostrate, a uterus, a breast cancer, an ovarian cancer, a liver cancer, an endometrial cancer, a lung cancer, preferably a non-small cell lung cancer, preferably, more preferably invasive mucinous adenocarcinoma, or a primary or metastatic cancer.

[1250] 65. An in vivo animal model comprising a polynucleotide fusion according to any one of clauses 1-23 and/or expressing a polypeptide fusion encoded therefrom, wherein preferably the polynucleotide fusion or polypeptide fusion comprised by the animal model is comprised by an engrafted aberrant cell present in the animal model or comprised by the genome of the animal model.

[1251] 66. A method of treatment of the in vivo animal model of claim 66 with an Erb2 and/or Erb3 targeting agent selected from the group consisting of a multispecific antibody comprising a first antigen-binding site that binds an extracellular part of ErbB-2 and a second antigen-binding site that binds an extracellular part of ErbB-3, a tyrosine kinase inhibitor of ErbB-2, a monospecific bivalent antibody comprising an antigen-binding site that bind an extracellular part of ErbB-2, a monospecific bivalent antibody comprising an antigen-binding site that bind an extracellular part of ErbB-3, or any combination thereof, said method comprising administering to the animal said Erb2 and/or Erb3 targeting agent.

[1252] 67. A first and a second nucleic acid probe for use in an in-situ hybridization assay to detect a genetic rearrangement of VAPB, CADM1, CD44, SLC3A2, VTCN1, CDH1 CXADR, GTF2E2, CSMD1, PTN, ST14, THBS1, AGRN, PVALB, APP, WRN, DAAM1, ASPH, NOTCH2, CD74, SDC4, SLC4A4, ZFAT or DSCAML1 wherein:
[1253] the first probe for detection of a genetic rearrangement of VAPB specifically hybridizes to a VAPB sequence which is 5′ from the nucleic acid of position 42 or 43 of SEQ ID NO: 1, and the second probe specifically hybridizes to a VAPB sequence which is 3′ from the nucleic acid of position 42 or 43 of SEQ ID NO: 1;
[1254] the first probe for detection of a genetic rearrangement of CADM1 specifically hybridizes to a CADM1 sequence which is 5′ from the nucleic acid of position 53 of SEQ ID NO: 5, and the second probe specifically hybridizes to a CADM1 sequence which is 3′ from the nucleic acid of position 53 of SEQ ID NO: 5;
[1255] the first probe for detection of a genetic rearrangement of CD44 specifically hybridizes to a CD44 sequence which is 5′ from the nucleic acid of position 52 of SEQ ID NO: 9, and the second probe specifically hybridizes to a CD44 sequence which is 3′ from the nucleic acid of position 52 of SEQ ID NO: 9;
[1256] the first probe for detection of a genetic rearrangement of SLC3A2 specifically hybridizes to a SLC3A2 sequence which is 5′ from the nucleic acid of position 53 of SEQ ID NO: 13, and the second probe specifically hybridizes to a SLC3A2 sequence which is 3′ from the nucleic acid of position 53 of SEQ ID NO: 13;
[1257] the first probe for detection of a genetic rearrangement of VTCN1 specifically hybridizes to a VTCN1 sequence which is 5′ from the nucleic acid of position 65 of SEQ ID NO: 164, and the second probe specifically hybridizes to a VTCN1 sequence which is 3′ from the nucleic acid of position 65 of SEQ ID NO: 164;
[1258] the first probe for detection of a genetic rearrangement of CDH1 specifically hybridizes to a CDH1 sequence which is 5′ from the nucleic acid of position 119 of SEQ ID NO: 184, and the second probe specifically hybridizes to a CDH1 sequence which is 3′ from the nucleic acid of position 119 of SEQ ID NO: 184;
[1259] the first probe for detection of a genetic rearrangement of CXADR specifically hybridizes to a CXADR sequence which is 5′ from the nucleic acid of position 43 of SEQ ID NO: 215, and the second probe specifically hybridizes to a CXADR sequence which is 3′ from the nucleic acid of position 43 of SEQ ID NO: 215;
[1260] the first probe for detection of a genetic rearrangement of GTF2E2 specifically hybridizes to a GTF2E2 sequence which is 5′ from the nucleic acid of position 141 of SEQ ID NO: 231, and the second probe specifically hybridizes to a GTF2E2 sequence which is 3′ from the nucleic acid of position 141 of SEQ ID NO: 231;
[1261] the first probe for detection of a genetic rearrangement of CSMD1 specifically hybridizes to a CSMD1 sequence which is 5′ from the nucleic acid of position 88 of SEQ ID NO: 253, and the second probe specifically hybridizes to a CSMD1 sequence which is 3′ from the nucleic acid of position 88 of SEQ ID NO:253;
[1262] the first probe for detection of a genetic rearrangement of PTN specifically hybridizes to a PTN sequence which is 5′ from the nucleic acid of position 102 of SEQ ID NO: 311, and the second probe specifically hybridizes to a PTN sequence which is 3′ from the nucleic acid of position 102 of SEQ ID NO: 311;
[1263] the first probe for detection of a genetic rearrangement of ST14 specifically hybridizes to a ST14 sequence which is 5′ from the nucleic acid of position 95 of SEQ ID NO: 328, and the second probe specifically hybridizes to a ST14 sequence which is 3′ from the nucleic acid of position 95 of SEQ ID NO: 328;
[1264] the first probe for detection of a genetic rearrangement of AGRN specifically hybridizes to a AGRN sequence which is 5′ from the nucleic acid of position 106 of SEQ ID NO: 401, and the second probe specifically hybridizes to a AGRN sequence which is 3′ from the nucleic acid of position 106 of SEQ ID NO: 401;
[1265] the first probe for detection of a genetic rearrangement of THBS1 specifically hybridizes to a THBS1 sequence which is 5′ from the nucleic acid of position 56 of SEQ ID NO: 374, and the second probe specifically hybridizes to a THBS1 sequence which is 3′ from the nucleic acid of position 56 of SEQ ID NO: 374;
[1266] the first probe for detection of a genetic rearrangement of PVALB specifically hybridizes to a PVALB sequence which is 5′ from the nucleic acid of position 102 of SEQ ID NO: 435, and the second probe specifically hybridizes to a PVALB sequence which is 3′ from the nucleic acid of position 102 of SEQ ID NO: 435;
[1267] the first probe for detection of a genetic rearrangement of SLC3A2 specifically hybridizes to a SLC3A2 sequence which is 5′ from the nucleic acid of position 93 of SEQ ID NO: 452, and the second probe specifically hybridizes to a SLC3A2 sequence which is 3′ from the nucleic acid of position 93 of SEQ ID NO: 452;
[1268] the first probe for detection of a genetic rearrangement of APP specifically hybridizes to a APP sequence which is 5′ from the nucleic acid of position 54 of SEQ ID NO: 484, and the second probe specifically hybridizes to a APP sequence which is 3′ from the nucleic acid of position 54 of SEQ ID NO: 484;
[1269] the first probe for detection of a genetic rearrangement of WRN specifically hybridizes to a WRN sequence which is 5′ from the nucleic acid of position 96 of SEQ ID NO: 526, and the second probe specifically hybridizes to a WRN sequence which is 3′ from the nucleic acid of position 96 of SEQ ID NO: 526;
[1270] the first probe for detection of a genetic rearrangement of DAAM1 specifically hybridizes to a DAAM1 sequence which is 5′ from the nucleic acid of position 75 of SEQ ID NO: 603, and the second probe specifically hybridizes to a DAAM1 sequence which is 3′ from the nucleic acid of position 75 of SEQ ID NO: 603;
[1271] the first probe for detection of a genetic rearrangement of ASPH specifically hybridizes to a ASPH sequence which is 5′ from the nucleic acid of position 75 of SEQ ID NO: 633, and the second probe specifically hybridizes to a ASPH sequence which is 3′ from the nucleic acid of position 75 of SEQ ID NO: 633;
[1272] the first probe for detection of a genetic rearrangement of NOTCH2 specifically hybridizes to a NOTCH2 sequence which is 5′ from the nucleic acid of position 75 of SEQ ID NO: 691, and the second probe specifically hybridizes to a NOTCH2 sequence which is 3′ from the nucleic acid of position 75 of SEQ ID NO: 691;
[1273] the first probe for detection of a genetic rearrangement of CD74 specifically hybridizes to a CD74 sequence which is 5′ from the nucleic acid of position 75 of SEQ ID NO: 715, and the second probe specifically hybridizes to a CD74 sequence which is 3′ from the nucleic acid of position 75 of SEQ ID NO: 715;
[1274] the first probe for detection of a genetic rearrangement of SDC4 specifically hybridizes to a SDC4 sequence which is 5′ from the nucleic acid of position 75 of SEQ ID NO: 741, and the second probe specifically hybridizes to a SDC4 sequence which is 3′ from the nucleic acid of position 75 of SEQ ID NO: 741;
[1275] the first probe for detection of a genetic rearrangement of CD44 specifically hybridizes to a CD44 sequence which is 5′ from the nucleic acid of position 75 of SEQ ID NO: 759, and the second probe specifically hybridizes to a CD44 sequence which is 3′ from the nucleic acid of position 75 of SEQ ID NO: 759;
[1276] the first probe for detection of a genetic rearrangement of SLC4A4 specifically hybridizes to a SLC4A4 sequence which is 5′ from the nucleic acid of position 75 of SEQ ID NO: 763, and the second probe specifically hybridizes to a SLC4A4 sequence which is 3′ from the nucleic acid of position 75 of SEQ ID NO: 763;
[1277] the first probe for detection of a genetic rearrangement of SDC4 specifically hybridizes to a SDC4 sequence which is 5′ from the nucleic acid of position 75 of SEQ ID NO: 822, and the second probe specifically hybridizes to a SDC4 sequence which is 3′ from the nucleic acid of position 75 of SEQ ID NO: 822;
[1278] the first probe for detection of a genetic rearrangement of ZFAT specifically hybridizes to a ZFAT sequence which is 5′ from the nucleic acid of position 75 of SEQ ID NO: 826, and the second probe specifically hybridizes to a ZFAT sequence which is 3′ from the nucleic acid of position 75 of SEQ ID NO: 826; or
[1279] the first probe for detection of a genetic rearrangement of DSCAML1 specifically hybridizes to a DSCAML1 sequence which is 5′ from the nucleic acid of position 75 of SEQ ID NO: 866, and the second probe specifically hybridizes to a DSCAML1 sequence which is 3′ from the nucleic acid of position 75 of SEQ ID NO: 866.

### EXAMPLES

### Example 1: Test Sample Preparation

[1280] Liquid samples or biopsies include blood, blood serum, blood plasma, pleural effusion, urine, semen, vaginal swab, amniotic fluid, peritoneal fluid, cell free lavage or other biofluids.

[1281] When blood is used as starting material, the blood can be collected in tubes treated with cell stabilizing agents such as Cell-Free DNA BCT tubes (Streck) which prevents lysis of blood cells post-collection and minimized contamination of wild-type DNA/RNA from normal cells.

### Example 2: Purification of Circulating DNA from Plasma

[1282] Although the protocol of this example is described in relation to the isolation of cfDNA from a plasma sample of 1 ml, the protocol also suitably allows for isolation from other volumes when higher yields are desired and other sample types, like urine and serum. The protocol is based on the QIAamp® circulating Nucleic Acid Kit (CNA) (Qiagen, Cat #55114) and Handbook dated October 2019 (HB-0202-006).

[1283] Before starting, plasma samples from a human subject are allowed to equilibrate to room temperature, either from storage at a suitable refrigerated temperature or directly after drawing from a patient. All centrifugation steps are carried out at room temperature. Where necessary, samples with a volume of below 1 ml are adjusted with phosphate buffered saline (PBS) to a total of 1 ml.

### Preparation of Buffers and Reagents.

[1284] Buffers ACB, ACW1 and ACW2 are prepared according to the manufacturer's instructions. Briefly, before use, 200 ml isopropanol (100 v/v %) is added to 300 ml buffer ACB concentrate to obtain 500 ml Buffer ACB. After adding isopropanol, the obtained buffer is mixed well. Before use, 25 ml ethanol 96-100 (v/v %) is added to 19 ml buffer ACW1 concentrate to obtain 44 ml buffer ACW1. The obtained liquid is mixed well after adding ethanol. Before use, 30 ml ethanol (96-100%) is added to 13 ml buffer ACW2 concentrate to obtain 43 ml buffer, which is subsequently well mixed. For instance, to process 12 samples of 1 ml plasma, 10.6 ml buffer ACL is mixed with 67.5 μl carrier RNA-containing AVE buffer.

Isolation of cfDNA from Plasma

[1285] Procedure: 100 μl QIAGEN Proteinase K is pipetted into a 50 ml centrifuge tube, 1 ml of plasma is added to the 50 ml tube. 0.8 ml ACL buffer (containing 1.0 μg carrier RNA) is added after which caps are closed and mixed by pulse-vortexing for 30 s while a visible vortex is formed in the tube. Sample and ACL buffer are mixed thoroughly to yield a homogeneous solution. The samples are immediately lysed by incubating at 60° C. for 30 minutes. 1.8 ml ACB buffer is added to the lysate in the tube after which the cap is closed and mix thoroughly by pulse-vortexing for 15-30 s. The lysate-ACB buffer mixture is incubated in the tube for 5 min on ice. QIAamp Mini columns are inserted into a VacConnector on a QIAvac 24 Plus which is set-up according the manufacturer's instructions. A 20 ml tube extender is firmly inserted into the open QIAamp Mini column.

[1286] After incubation on ice, the lysate-ACB buffer mixture is applied into the tube extender of the QIAamp Mini column. The vacuum pump is switched on and when all lysates are drawn through the columns completely, the vacuum pump is switched off and pressure is released to 0 mbar. The tube extender is carefully removed and discarded. If part of the QIAvac Connecting System, a Vacuum Regulator can be used. Cross-contamination is avoided by not moving the tube extenders over neighboring QIAamp Mini Columns. 600 μl ACW1 buffer is applied to the QIAamp Mini column. Lids of the column are left open and the vacuum pump switched on. After all of the ACW1 buffer has been drawn through the QIAamp Mini column, the vacuum pump is switched off and pressure is released to 0 mbar. 750 μl ACW2 buffer is applied to the QIAamp Mini column. The lid of the column is left open, and the vacuum pump switched on. After all of ACW2 buffer is drawn through the QIAamp Mini column, the vacuum pump is switched off and pressure is released to 0 mbar. 750 μl of ethanol (96 v/v %) is applied to the QIAamp Mini column. The lid of the column is left open, and the vacuum pump switched on. After all of ethanol is drawn through the spin column, the vacuum pump is switched off and pressure is released to 0 mbar. The lid of the QIAamp Mini column is closed and the column is removed from the vacuum manifold after which the VacConnector is discarded. The QIAamp Mini column is placed in a clean 2 ml collection tube, and centrifuged at full speed (20,000×g; 14,000 rpm) for 3 min. The QIAamp Mini Column is placed in a new 2 ml collection tube. The lid is opened and the assembly is incubated at 56° C. for 10 min to completely dry the membrane. The QIAamp Mini column is placed in a clean 1.5 ml elution tube and the lastly used 2 ml collection tube is discarded. 20 μl of AVE buffer is carefully applied to the center of the QIAamp Mini membrane. The lid is closed and incubated at room temperature for 3 min. Elution buffer AVE is equilibrated to room temperature. The recovered eluate volume is about 5 μl less than the elution volume applied to the QIAamp Mini column. The columns are centrifuged in a microcentrifuge at full speed (20,000×g; 14,000 rpm) for 1 min to elute the nucleic acids such that cell free DNA is obtained.

[1287] Free-circulating cell-free DNA is eluted in AVE buffer, ready for use in amplification reactions or storage at −30 to −15° C. Purified nucleic acids are free of proteins, nucleases, and other impurities.

[1288] Next, the concentration of the nucleic acids is determined prior to NRG1 fusion amplification and detection analysis according to the manufacturer's recommendation, such as quantitative amplification assays.

[1289] List of materials for the QIAvac 24 Plus System for vacuum processing of 1-24 QIAGEN spin columns. QIAvac 24 Plus: Vacuum Manifold for processing 1-24 spin columns which includes QIAvac 24 Plus Vacuum Manifold, Luer Plugs and Quick Couplings (Cat. No. 19413). VacConnectors (500): 500 disposable connectors for use with QIAamp Mini columns on luer slots or VacValves (Cat. No. 19407). VacValves (24): 24 valves for use with the QIAvac 24 Plus (Cat. No. 19408). Vacuum Regulator: For use with QIAvac manifolds (Cat. No. 19530). Vacuum Pump (230 V, 50 Hz): Universal vacuum pump (capacity 34 L/min, 8 mbar vacuum abs.) (Cat. No. 84020). QIAvac Connecting System: System to connect vacuum manifold with vacuum pump: includes tray, waste bottles, tubing, couplings, valve, gauge, 24 VacValves (Cat. No. 19419).

### Example 3: Circulating Tumor RNA (cfRNA)

Purification of Circulating RNA from Serum

[1290] Although the protocol of this example is described in relation to the isolation of circulating RNA from a serum sample of 4 ml, the protocol also suitably allows for isolation from other volumes when higher yields are desired and other sample types, like urine or plasma. The protocol is based on the QIAamp® circulating Nucleic Acid Kit (CNA) (Qiagen, Cat #55114) and Handbook dated October 2019 (HB-0202-006).

[1291] Before starting, serum samples from a human subject are allowed to equilibrate to room temperature, either from storage at a suitable refrigerated temperature or directly after drawing from a patient. All centrifugation steps are carried out at room temperature. Where necessary, samples with a volume of below 4 ml are adjusted with phosphate buffered saline (PBS) to a total of 4 ml.

### Preparation of Buffers and Reagents.

[1292] Buffers ACB, ACW1 and ACW2 are prepared according to the manufacturer's instructions. Briefly, before use, 200 ml isopropanol (100 v/v %) is added to 300 ml buffer ACB concentrate to obtain 500 ml Buffer ACB. After adding isopropanol, the obtained buffer is mixed well. Before use, 25 ml ethanol 96-100 (v/v %) is added to 19 ml buffer ACW1 concentrate to obtain 44 ml buffer ACW1. The obtained liquid is mixed well after adding ethanol. Before use, 30 ml ethanol (96-100%) is added to 13 ml buffer ACW2 concentrate to obtain 43 ml buffer, which is subsequently well mixed. For instance, to process 12 samples of 4 ml serum, 42.2 ml buffer ACL is mixed with 67.5 μl carrier RNA-containing AVE buffer.

Isolation of cfRNA from Serum

[1293] Procedure: 400 μl QIAGEN Proteinase K is pipetted into a 50 ml centrifuge tube, 4 ml of serum is added to the 50 ml tube. 3.2 ml ACL buffer (containing 1.0 μg carrier RNA) is added after which caps are closed and mixed by pulse-vortexing for 30 s while a visible vortex is formed in the tube. Sample and ACL buffer are mixed thoroughly to yield a homogeneous solution. The samples are immediately lysed by incubating at 60° C. for 30 minutes. 7.2 ml ACB buffer is added to the lysate in the tube after which the cap is closed and mix thoroughly by pulse-vortexing for 15-30 s. The lysate-ACB buffer mixture is incubated in the tube for 5 min on ice. QIAamp Mini columns are inserted into a VacConnector on a QIAvac 24 Plus which is set-up according the manufacturer's instructions. A 20 ml tube extender is firmly inserted into the open QIAamp Mini column.

[1294] After incubation on ice, the lysate-ACB buffer mixture is applied into the tube extender of the QIAamp Mini column. The vacuum pump is switched on and when all lysates are drawn through the columns completely, the vacuum pump is switched off and pressure is released to 0 mbar. The tube extender is carefully removed and discarded. If part of the QIAvac Connecting System, a Vacuum Regulator can be used. Cross-contamination is avoided by not moving the tube extenders over neighboring QIAamp Mini Columns. 600 μl ACW1 buffer is applied to the QIAamp Mini column. Lids of the column are left open and the vacuum pump switched on. After all of the ACW1 buffer has been drawn through the QIAamp Mini column, the vacuum pump is switched off and pressure is released to 0 mbar. 750 μl ACW2 buffer is applied to the QIAamp Mini column. The lid of the column is left open, and the vacuum pump switched on. After all of ACW2 buffer is drawn through the QIAamp Mini column, the vacuum pump is switched off and pressure is released to 0 mbar. 750 μl of ethanol (96 v/v %) is applied to the QIAamp Mini column. The lid of the column is left open, and the vacuum pump switched on. After all of ethanol is drawn through the spin column, the vacuum pump is switched off and pressure is released to 0 mbar. The lid of the QIAamp Mini column is closed and the column is removed from the vacuum manifold after which the VacConnector is discarded. The QIAamp Mini column is placed in a clean 2 ml collection tube, and centrifuged at full speed (20,000×g; 14,000 rpm) for 3 min. The QIAamp Mini Column is placed in a new 2 ml collection tube. The lid is opened and the assembly is incubated at 56° C. for 10 min to completely dry the membrane. The QIAamp Mini column is placed in a clean 1.5 ml elution tube and the lastly used 2 ml collection tube is discarded. 20 μl of AVE buffer is carefully applied to the center of the QIAamp Mini membrane. The lid is closed and incubated at room temperature for 3 min. Elution buffer AVE is equilibrated to room temperature. The recovered eluate volume is about 5 μl less than the elution volume applied to the QIAamp Mini column. The columns are centrifuged in a microcentrifuge at full speed (20,000×g; 14,000 rpm) for 1 min to elute the nucleic acids such that cell free RNA is obtained.

[1295] Free-circulating cell-free RNA is eluted in AVE buffer, ready for use in amplification reactions or storage at −30 to −15° C. Purified nucleic acids are free of proteins, nucleases, and other impurities.

[1296] Next, the concentration of the nucleic acids is determined prior to NRG1 fusion amplification and detection analysis according to the manufacturer's recommendation, such as quantitative amplification assays.

[1297] List of materials for the QIAvac 24 Plus System for vacuum processing of 1-24 QIAGEN spin columns. QIAvac 24 Plus: Vacuum Manifold for processing 1-24 spin columns which includes QIAvac 24 Plus Vacuum Manifold, Luer Plugs and Quick Couplings (Cat. No. 19413). VacConnectors (500): 500 disposable connectors for use with QIAamp Mini columns on luer slots or VacValves (Cat. No. 19407). VacValves (24): 24 valves for use with the QIAvac 24 Plus (Cat. No. 19408). Vacuum Regulator: For use with QIAvac manifolds (Cat. No. 19530). Vacuum Pump (230 V, 50 Hz): Universal vacuum pump (capacity 34 L/min, 8 mbar vacuum abs.) (Cat. No. 84020). QIAvac Connecting System: System to connect vacuum manifold with vacuum pump: includes tray, waste bottles, tubing, couplings, valve, gauge, 24 VacValves (Cat. No. 19419).

[1298] To avoid loss of RNA from biological material during and after purification, any plasticware or glassware is first thoroughly cleaned to eliminate possible RNase contamination. Inadvertent introduction of RNases into the isolation procedure is avoided by creating and maintaining an RNase-free environment.

### Example 4: Isolation of Circulating Tumor Cells

[1299] This protocol describes isolation of circulating tumor cells from whole blood using the AdnaTest BreastCancerSelect kit (ADNAGEN, catalog #T-1-508), which enables immunomagnetic enrichment of tumor cells via epithelial and tumor-associated antigens. Antibodies against epithelial and tumor associated antigens are conjugated to magnetic beads (Dynabeads) for labeling tumor cells in peripheral blood. Labeled cells are extracted by a magnetic particle concentrator (AdnaMag-L and AdnaMag-S) and are subsequently lysed. mRNA is isolated from the resulting lysate and used for NRG1 fusion detection.

[1300] Whole blood (at least 5 ml, but 10 ml is also possible) is collected in tubes containing EDTA ((e. g. ‘S Monovette® Kalium EDTA’, Sarstedt; ‘BD Vacutainer® K3EDTA’, Becton Dickinson) and is immediately placed on ice following the draw and processed within 4 hours.

[1301] Preparation of Select Beads: The BreastSelect Beads (provided in the kit) are resuspended thoroughly by pipetting. The volume of BreastSelect Beads required for all samples is calculated and the calculated volume transferred to 1.5 ml reaction tubes. The tubes are placed in AdnaMag-S Magnetic particle concentrator (AdnaGen GmbH, cat. No. T-1-800). Supernatant is removed after 1 min. Beads are washed with 1 ml PBS (Phosphate buffer saline; pH 7.0-7.3) three times. The tubes are removed from the AdnaMag-S and resuspended in 100 μl PBS.

[1302] Selection of Tumor cells: 5 ml of blood sample was first pipetted into a 15 ml tube. 100 μl of resuspended BreastSelect Beads are added to each blood sample. The tubes are rotated slowly (approx. 5 rpm) for 30 min at room temperature on a device allowing both tilting and rotation. The tubes are then placed into the AdnaMag-L (AdnaGen GmbH, cat. No. T-1-700) without magnetic slider, which is swung downwards to release blood drops captured in the cap. The magnetic slider is then inserted and the tubes incubated for 3 min at room temperature. The blood supernatant is removed completely with a 10 ml pipet without touching the beads. Washing is done three times by first removing the magnetic slider from the AdnaMag-L, adding 5 ml of PBS to the tubes and gentle resuspension of the magnetic bead/cell complex gently. The magnetic slider is placed back into the AdnaMag-L and tubes are incubated for 1 min at room temperature, followed by removal of the supernatant with a pipet. After washing, the magnetic slider is removed and bead/cell complexes are resuspended in 1 ml PBS and transferred to a 1.5 ml reaction tube. The reaction tube is placed into the AdnaMag-S with an inserted magnetic slider. After 1 min, the supernatant is completely removed for the subsequent cell lysis.

[1303] The magnetic slider is removed from the AdnaMag-S and 200 μl of room temperature equilibrated Lysis/Binding buffer (provided in the kit) is added to each reaction tube followed by resuspension by pipetting five times. The magnetic slider is inserted into the AdnaMag-S and incubated for 1 min. The supernatants containing the cell lysates are transferred to a new 1.5 ml reaction tubes and the tubes containing the beads are discarded. The cell lysates are suitable for mRNA-isolation or stored at −20° C. mRNA of the lysate is isolated using Oligo (dT) primers in a reverse transcription (RT-PCR) reaction and transcribed into cDNA template. NRG1 fusions are subsequently detected by PCR mediated amplification.

### Example 5: Extracellular Vesicles and Exosomes

[1304] Total vesicular RNA is obtained from blood using the ExoRNeasy Maxi kit (cat. No. 77023, QIAGEN GmbH, Hilden, Germany) which is based on membrane-based affinity binding step to isolate exosomes and other EVs from cell-free biofluids.

[1305] Step 1 includes plasma separation and storage. Whole blood is collected in BD Vacutainer® Venous Blood Collection Tubes (cat. no. 367525) containing EDTA (or PAXgene® Blood ccfDNA Tubes [cat. no. 768115] and Cell-Free DNA BCT®—but not RNA BCT—tubes from Streck). The tubes are stored at room temperature or 4° C. and processed within 1 hour. Blood samples are centrifuged in primary blood collection tubes for 10 min at 1900×g (3000 rpm) and 4° C. using a swinging bucket rotor. The upper (yellow) plasma phase is carefully transferred to a new tube (with conical bottom) without disturbing the intermediate buffy coat layer (containing white blood cells and platelets). Plasma samples are centrifuged in conical tubes for 15 min at 3000×g (or 10 min at 16,000×g—see above) and 4° C. or passed through a 0.8 μm filter (Sartorius® Minisart® NML [Sartorius cat. no. 16592]). The cleared supernatant is carefully transferred to a new tube without disturbing the pellet. The plasma is stored at 2-8° C. for up to 6 h and processed on the same day.

[1306] Step 2 describes capture and lysis of exosomes and other extracellular vesicles (EVs) from 4 ml of plasma. 4 ml of binding buffer XBP is added to 4 ml of plasma sample and mixed well immediately by gently inverting the tube 5 times. The plasma/XBP mix is added onto the exoEasy spin column (membrane affinity column which binds the EVs to the membrane) and centrifuged for 1 min at 500×g. The flow through is discarded and the column is placed back into the same collection tube. 10 ml wash buffer XWP is added to the exoEasy Maxi spin column, and centrifuged for 5 min at 5000×g. The flow through is discarded together with the collection tube. The spin column is transferred to a fresh collection tube. 700 μl QIAzol is added to the membrane for lysis of vesicles, centrifuged for 5 min at 5000×g to collect the lysate, and transferred completely to a 2 ml tube.

[1307] Step 3 describes isolation of total RNA from the lysate. Buffers RWT and RPE are prepared according to the manufacturer's instructions. The tube containing the lysate is briefly vortexed and incubated at room temperature for 5 min. 90 μl chloroform is then added to the tube and shaken vigorously for 15 s. After incubation at room temperature for 2-3 min, the tube is centrifuged for 15 min at 12,000×g at 4° C. The upper aqueous phase is transferred to a new collection tube, 2 volumes of 100% ethanol added and mixed thoroughly. 700 μl sample is pipetted into an RNeasy MinElute spin column in a 2 ml collection tube and centrifuged at ≥8000×g (≥10,000 rpm) for 15 s at room temperature. After discarding the flow through, this step is repeated using the remainder of the sample. 700 μl Buffer RWT is added to the RNeasy MinElute spin column and centrifuged for 15 s at ≥8000×g (≥10,000 rpm), followed by 500 μl Buffer RPE and centrifuged for 15 s at ≥8000×g (≥10,000 rpm). Flow-through is discarded at each step. Finally 500 μl Buffer RPE is added onto the RNeasy MinElute spin column and centrifuged for 2 min at ≥8000×g (≥10,000 rpm). The collection tube is discarded with the flow-through.

[1308] The RNeasy MinElute spin column is placed into a new 2 ml collection tube and centrifuge at full speed for 5 min with an open lid to dry the membrane. The collection tube is discarded with the flow through. RNA is eluted by adding 14 μl RNase-free water, let column stand for 1 min, and centrifuged for 1 min at full speed.

### Example 6: Tumor-Educated Platelets (TEPs)

[1309] Tumor cells are known to transfer (mutant) RNA into blood platelets, which are subsequently used to detect tumor-associated RNA markers. This protocol minimizes degradation of platelet mRNAs and minimizes the contamination by other cell types like red blood cells and leukocytes (Amisten S, Methods Mol Biol. 2012). RNA obtained from blood platelets is then used to amplify and detect NRG1 fusions.

[1310] Preparation of Antibody Conjugated Magnetic Beads: 1 ml Dynabead wash buffer (PBS with 0.1% (w/v) BSA, pH 7.4) is mixed with 250 μl Dynabead slurry (Dynabeads® Pan Mouse IgG, Invitrogen) and placed in the Dynamag magnet (DynaMag™ 2 or DynaMag™ 15, Invitrogen) for 1 min followed by removal of the liquid. After another wash, beads are removed from the magnet and resuspended in 250 μL wash buffer. 15 μl of anti-CD235a antibody (Mouse, anti-human CD235a, red blood cell surface marker, BD Inc, NJ, USA) and 15 μl anti-CD45 antibody (Mouse anti-human CD45, leukocyte surface marker, BD Inc, NJ, USA) are added to the beads, mixed and incubated for at least 30 min with gentle tilting and rotation. Supernatant is removed by placing the tube in the magnet for 1 min and beads are resuspended in 250 μl wash buffer before storing at 4° C.

[1311] Blood Collection and purification of platelets: A platelet inhibition cocktail is prepared with 18 ml ACD (sterile anticoagulant: citrate-dextrose solution, Sigma Aldrich), 12 μl of 1 mM PGE1 (Prostaglandin E1, 1 mM stock in ethanol, Sigma Aldrich), 120 μl of 30 mM acetylsalicylic acid (30 mM stock in ethanol, Sigma Aldrich), and 480 μl of 0.5 M EDTA (Sigma Aldrich). 8.5 ml of blood is collected in tubes of 15 ml tubes further containing 1.5 ml platelet inhibition cocktail. After centrifugation at room temperature at 200 g, 20 min, top 85% of the upper layer, the platelet rich plasma (PRP), is transferred to a new 15 ml tube. After another round of centrifugation (200 g, 10 min, room temperature) to further remove leukocytes and red blood cells, 85% of PRP is transferred to a 50 ml tube. The PRP is then filtered with the AutoStop™ BC high efficiency filter for leukocyte removal (Pall Inc, Cat. No. ATSBC1E), the filtrate is mixed with antibody conjugated magnetic beads and incubated while tilting and rotating at room temperature for 45 min. The PRP/bead mix is placed in the DynaMag™-2 for 2 min and supernatant transferred to a new tube to obtain depleted PRP. After repetition of PRP depletion step, supernatant is centrifuged to harvest platelets at 800 g, 10 min at room temperature. Platelet pellets are weighed and dissolved using 1 ml TRIzol (Invitrogen) per 100 mg of pellet, with a minimum of 1 mL TRIzol for samples weighing less than 100 mg.

[1312] Isolation of platelet RNA: Platelet samples dissolved in TRIzol are incubated at room temperature for 5 min and 200 μl chloroform (Sigma Aldrich) added to each tube. After shaking vigorously for 15-30 times, tubes are incubated for 2-3 min at room temperature and centrifuged at 12,000 g for 15 min at 4° C. 10 μg ultra-pure glycogen (UltraPure™ Glycogen, Invitrogen, Cat. No. 10814-010) is added to new RNase-free tubes. The aqueous phase of the TRIzol/chloroform mix is carefully added to glycogen containing tubes followed by 500 μl of cooled isopropanol (Sigma Aldrich). The tubes are mixed and left overnight at −20° C. After centrifugation at 12,000 g for 15 min at 4° C., the supernatant is removed and RNA pellet washed in 1 ml of 75% ethanol. Dried RNA pellets are dissolved in RNase-free water and can be further used for reverse transcription into cDNA.

### Example 7: ddPCR Nucleic Acid Amplification and Fusion Detection

[1313] Droplet Digital Polymerase Chain reaction (ddPCR) is used to detect target nucleic acid fusions from liquid biopsy cfDNA and cfRNA samples.

[1314] Droplet Digital Polymerase Chain reaction (ddPCR) performed with Bio-Rad's QX100™ or QX200™ Droplet Digital PCR system allows to detect target nucleic acid fusions from liquid biopsy DNA and/or RNA (cDNA) samples.

[1315] Primers and Probes: Primers are designed around the fusion junctions, or breakpoints, to amplify an NRG1 fusion product of 60-200 bp in size. Primer3 program (Whitehead Institute for Biomedical Research, Massachusetts Institute of Technology) is used to design primers with a GC content of 50-60%, Tₘ between 5° and 65° C. (at 50 mM salt concentration and 300 nM oligonucleotide concentration), avoiding secondary structures and primer dimers.

[1316] TaqMan™ hydrolysis probes are used which are sequence-specific and fluorescently labeled with FAM, HEX or VIC dyes. The probe sequence is chosen to be in between the two primers of the amplicon. Tₘ of the hydrolysis probe is 3-10° C. higher than that of the primers and the GC content is 30-80%. The probes are <30 nucleotides long.

[1317] Sample preparation: Concentration of input DNA/RNA is assessed using A260 spectroscopy, to ensure that the target DNA/RNA concentration that is being loaded is within the dynamic range of detection. The recommended DNA dynamic range of the QX100 or QX200 System is from 1 to 120,000 copies/20 μl reaction. Restriction digestion is also performed for genomic DNA using a 4-cutter or a 6-cutter enzyme and 10 Units enzyme/μg DNA according to the manufacturer's recommendations. Digested DNA is stored at −20° C. until further use.

[1318] When the experiment is performed with cfDNA as the starting material, synthetic DNA containing the sequences of the fusion variants is used as the positive control. The fusion sequence includes the fusion site plus sufficient length flanking on each side to cover the PCR amplicon. The resulting nucleotide sequence is between 50-250 ntd. A T7 promoter sequence (5′-CAGAGATGCATAATACGACTCACTATAGGGAGA-3′) is added to the 5′ end of the target sequence. The synthetic sequences are ordered from IDT (www.idtdna.com) as double stranded deoxyribonucleic acid (DNA) fragments and reconstituted in Tris-EDTA (TE) buffer to a final concentration of 10 ng/μl.

[1319] When RNA is used as the starting material, RT-PCR is used to first generate cDNA, for instance with Bio-Rad's iScript™ Select cDNA Synthesis Kit for oligo (dT) or gene-specific priming. cDNA synthesis is performed according to the manufacturer's manual. The concentration of cDNA is reduced to about 0.2 ng/μl RNA equivalent and 5 μl is used per Droplet Digital PCR reaction (total volume 20 μl).

[1320] For generation of positive control for cfRNA, 60 ng of synthetic DNA is converted into RNA using in vitro transcription and the resulting RNA transcripts are purified using phenol/guanidine based reagents. DNase I is added to remove residual template DNA. Quality of RNA is assessed by gel electrophoresis. The obtained RNA is diluted to concentration ranging from 0.25 to 2.5 fg, based on desired copy number output in the test sample. 10 μl aliquots of analytical RNA for use in the positive control are stored at −80° C. Nuclease-free water is used as negative control for both cfDNA and cfRNA.

[1321] ddPCR reaction: 20 μl PCR mix is prepared, containing the sample nucleic acid (1 μg of DNA or cDNA with a final concentration of 50 ng/μl), 2×ddPCR supermix for probes ((Bio-Rad, cat. no. 1863023; without 2′-deoxyuridine 5′-triphosphate)—10 μl, 20× fusion specific primers/probes set (450 nmol/L primers, 250 nmol/L FAM probe)—1 μl, 20× control target primers/probe set (450 nmol/L primers, 250 nmol/L HEX probe)—1 μl and nuclease-free water. An initial reaction pool slightly more than 20 μl (22-25 μl) is created to ensure that 20 μl of mixture is transferred to the DG8 cartridge (Bio-Rad, cat. no. 1864007). Reaction mixes are combined and mixed well in a separate tube and not in the droplet generator cartridge. Reaction mixes are then transferred to the DG8 Cartridge already preloaded in the DG8 Cartridge Holder (Bio-Rad, cat. no. 1863051).

[1322] After loading the 20 μl PCR reaction, 70 μl of Droplet Generation Oil (Bio-Rad, cat. no. 1863005) is loaded into the bottom wells of the DG8 Cartridge. A gasket is attached across the top of the DG8 Cartridge which is placed into the QX200 Droplet Generator. The Droplet Generator produces about 20,000 droplets per sample in about 2.5 min for eight samples. Droplets are then transferred to a 96-well plate by pipetting gently. The PCR plate is heat sealed using Bio-Rad's PX1™ PCR Plate Sealer and pierceable foil heat seal. The PCR plate is then placed in a C1000 Touch™ Thermal Cycler with 96-deep well reaction module for PCR. The thermal cycling conditions are as follows: Enzyme activation at 95° C. (10 min, 1 cycle); Denaturation (94° C., 30 sec) and Annealing/extension (55° C., 1 min) for 40 cycles; Enzyme deactivation at 98° C., 10 min, 1 cycle. A Ramp rate of 2° C./sec is used.

[1323] Following PCR amplification of the nucleic acid target in the droplets, the plate containing the droplets is placed in a QX100 or QX200 Droplet Reader, where using the QuantaSoft Software, each droplet is analyzed individually using a two-color detection system (set to detect FAM and HEX). Positive droplets, which contained at least one copy of the target DNA/RNA molecule, exhibit increased fluorescence compared to negative droplets. The concentration reported is in copies/μl of the final 1×ddPCR reaction. Thresholding tools are used to correctly designate the droplet populations as double negative (negative for both FAM and HEX), FAM positive, HEX positive, and double positive (positive for both FAM and HEX). Using the ABS analysis, absolute quantification of the target is obtained in copies/microliter and copies/droplet.

### Example 8: Anchored Multiplex PCR

[1324] Anchored Multiplex PCR (AMP) is used for the detection of gene fusions and to detect multiple fusions to the gene of interest. The following protocol is based on Archer FusionPlex Solid Tumor kit (ArcherDX, cat. no. AB0005) and to be performed using RNA obtained from liquid biopsy from e.g. example 6.

### Library Preparation:

[1325] A positive control is included which contains at least several confirmed gene fusions. A non-template control is included as an additional sample in every run.

[1326] Random Priming, First and Second strand cDNA synthesis: The desired input for the assay is 200 ng RNA, dilute in 10 mM Tris HCl pH8.0. 20 μl of the diluted RNA is added to the pre-chilled Random Priming reagent strip tubes (provided in the kit). Following mixing and a brief spin, the mixture is transferred to 96 well PCR plate, sealed with RT film (USA Scientific, cat. no. 2921-7800) and incubated in thermocycler block at 65° C. for 5 minutes (heated lid).

[1327] The random priming product is transferred into the First Strand reagent strip tubes (placed in pre-chilled aluminum block) and mixed, brief spin and transferred to a 96 well PCR plate. The following thermocycler program is used: 25° C. 10 min, 42° C. 30 min, 80° C. 20 min, 4° C. hold (heated lid).

[1328] 1:10 dilution of the first strand product is made in a new set of PCR strip tubes in nuclease free water, to be used in Pre-Seq quality control (QC) assay. QC assay is primarily used for the verification of no cDNA synthesis from the no-template control. The QC assay is carried out according to the manufacturer's protocol.

[1329] For second strand cDNA synthesis, 21 μl nuclease free water is added to the remaining first strand product and 40 μl of this product is added to the Second Strand reagent strip tube (provided in the kit, placed in pre-chilled aluminum block). After mixing and a brief spin, the mixture is transferred to a 96 well PCR plate and sealed. The plate is inserted in thermocycler block, and the following thermocycler program used: 16° C. 60 min, 75° C. 20 min, 4° C. hold (heated lid).

[1330] End Repair: 40 μl of the second strand product is transferred into the End Repair reagent strip tube (provided in the kit, placed in pre-chilled aluminum block). After mixing and a brief spin, the strip tube is incubated in thermocycler block at 25° C. 30 min followed by 4° C. on hold. The End Repair product is added to purification beads (Agencourt AMPure XP Beads, Bechman Coulter, cat. no. A63881) at room temperature. After mixing, the mixture is incubated at room temperature for 5 minutes, followed by a 5-minute incubation on magnet (Alpaqua, cat. no. A32782). Supernatant is discarded, beads are washed twice with 200 μl 70% ethanol with 30 second incubations and air dried for 5 minutes. The beads are re-suspended in 22 μl 10 mM Tris HCl pH 8.0, incubated off the magnet for 3 minutes followed by a 2-minute incubation on the magnet.

[1331] Ligation Step 1: 20 μl from the End Repair bead purification plate is transferred into the Ligation Step 1 strip tubes (provided in the kit, placed in pre-chilled aluminum block). After mixing and a brief spin, the mixture is incubated in a 96 well PCR plate in thermocycler block for 37° C. 15 min and 4° C. on hold (heated lid). The entire volume of Ligation Step 1 product is added to 50 μl of room temperature equilibrated beads. After mixing, the mixture is incubated at room temperature for 5 minutes, followed by a 5-minute incubation on the magnet. The supernatant is discarded and beads washed twice with 200 μl 70% ethanol with 30 second incubations. After the final wash all 70% ethanol is removed and the beads air dried for 5 minutes. The beads are removed from magnet and re-suspended in 42 μl 10 mM Tris HCl pH 8.0, incubated off the magnet for 3 minutes followed by a 2-minute incubation on the magnet.

### Ligation Step 2:

[1332] MBC Adapter Strip tube reagents (provided in the kit) are removed from 4° C. storage and numbered properly. The sample-specific indexes are also recorded for sequencing purposes.

[1333] 40 μl from the Ligation Step 1 bead purification plate is transferred to the MBC Adapter strip tubes (ArcherDX cat. no. AK0016-48, placed in pre-chilled aluminum block). After mixing and a brief spin, the mixture is transferred to Ligations Step 2 reagent strip tubes (provided in the kit, also placed in pre-chilled aluminum block). After mixing and a brief spin, the mixture is incubated in a thermocycler for 22° C. 5 min, and 4° C. on hold.

[1334] Ligation Cleanup beads (equilibrated at room temperature) are vortexed and 50 μl added to a new set of PCR strip tubes. After 1 minute incubation on magnet, the supernatant is discarded. Strip tubes are removed from magnet and re-suspended in 50 μl of Ligation Cleanup Buffer.

[1335] Ligation Step 2 product is added to the Ligation Cleanup bead strip tubes, mixed by vortexing and incubated at room temperature for 5 minutes. The mixing and incubation is repeated following which the samples are incubated on the magnet for 1 minute and supernatant discarded. 200 μl of Ligation Cleanup buffer is added for re-suspension and after a quick spin and the mixture is placed on magnet for 1 minute. Washing with the Ligation cleanup buffer is repeated. An identical wash is performed using ultrapure water, following which the beads are re-suspended in 20 μl of 5 mM NaOH and incubated in a PCR plate as follows in thermocycler block: 75° C. 10 min, 4° C. hold (heated lid). The PCR plate is placed on magnet for at least 3 minutes.

[1336] First PCR: 2 μl of the NRG1 specific primers (GSP1 primers) are added to each well of the First PCR reagent strip tubes (provided in the kit) and mixed with 18 μl of Ligation 2 cleanup product. After a brief spin, the mixture is incubated in a thermocycler with the following program: 95° C. 3 min, 15 cycles 95° C. 30 sec-65° C. 5 min (100% ramp rate), 72° C. 3 min, 4° C. hold (heated lid).

[1337] 20 μl of First PCR product is added to 24 μl of room temperature-equilibrated beads, mixed and incubated at room temperature for 5 min and on magnet for 2 min. Following removal of supernatant, the beads are washed twice with 200 μl 70% ethanol with 30 second incubations, air dried and resuspended in 24 μl 10 mM Tris HCl pH8.0.

### Second PCR and Library Quantitation

[1338] 2 μl of the additional NRG1 specific primers (GSP2 primers) are added to each well of the properly labeled Second PCR reagent strip tubes (provided in the kit) in a cold aluminum block, and mixed with 18 μl of the First PCR cleanup product. After a brief spin, the mixture is incubated in a thermocycler block as follows: 95° C. 3 min, 18 cycles 95° C. 30 sec-65° C. 5 min (100% ramp rate), 72° C. 3 min, 4° C. hold (heated lid).

[1339] 20 μl of Second PCR product is added to 24 μl of room temperature-equilibrated beads, mixed and incubated at room temperature for 5 min and on magnet for 2 min. Following removal of supernatant, beads are washed twice with 200 μl of 70% ethanol with 30 second incubations, air dried and resuspended in 24 μl 10 mM Tris HCl pH8.0. After 2 minute incubation on the magnet, 20 μl of Second PCR cleanup product is transferred to a new PCR plate and quantified.

[1340] The concentration of each library is determined by qPCR using Kapa Biosystems Library Quantification Kit for Illumina no. KK4973, according to the manufacturer's instructions. The Second PCR product is serially diluted using 10 mM Tris HCl pH8.0 0.05% Tween. 6 μl of library quantitation master mix (Kapa Biosystems, cat. no. KK4973) is added per well to an optical 96-well plate followed by 4 μl of appropriate dilution or Standard (Kapa Biosystems, cat no. KK4906, KK4903). The following qPCR program is used: 1 cycle 95° C. 5 min, 35 cycles 95° C. 30 sec (4.4° C./sec ramp rate)-60° C. 45 sec (2.2° C./sec ramp rate). After library quantification is complete, all libraries are normalized and pooled by combining 10 μl of each normalized library into one 1.5 ml microcentrifuge tube.

### Sequencing of Libraries:

[1341] Sequencer reagent cartridge is removed from cold storage and placed in deionized water up to the fill line for at least one hour. The sequencer reagent kit (MiSeq Reagent Kit v3-600 cycle; Illumina; cat. no. MS-102-3003) is allowed to equilibrate with room temperature. 10 μl of the library pool is combined with 10 μl of 0.2N NaOH to make the Denatured Amplicon Library (DAL) pool and incubated at room temperature for 5 min. 10 μl of 200 mM Tris HCl pH 7.0 is added to the DAL, followed by 970 μl of HT1 buffer (provided in the kit).

[1342] The final load tube is made by combining 300 μl of HT1, 25 μl of 20 pM PhiX and 675 μl of the DAL pool. After mixing and a brief spin, the entire volume of the load tube is added to the sample well of the sequencer reagent cartridge and the cartridge is loaded into the sequencer running 2×151 bp reads with 2×8 index reads (MiSeqDx System—Illumina).

[1343] RNA Fusion data is analyzed using an appropriate bioinformatic data analysis software.

### Example 9: Next-Generation Sequencing

[1344] Next-generation sequencing is performed with DNA samples using MI-Exome test (Caris Molecular Intelligence®, Caris Life Sciences) that uses DNA and provides tumor mutational profiling using a custom human exome panel to detect variants including single nucleotide polymorphisms, insertions/deletions and DNA rearrangement and fusion events among others.

[1345] The following custom exome panel, which is a blend of five panels is used. The panel is validated for use with the Illumina NovaSeq 6000 instrument. The blend includes two off-the-shelf panels from Agilent and three panels developed and optimized by Caris:
[1346] Agilent Human All Exon V7 Panel (48 MB)
[1347] Agilent SNP Backbone Panel (3 MB panel with 1 MB resolution)
[1348] Caris 719-Gene Targeted Clinical Panel (1 MB)
[1349] Caris Intronic Fusion Panel (0.1 MB)
[1350] Caris Pathogenic Panel (0.1 MB)

[1351] For RNA as the starting material, next generation sequencing is performed using a whole transcriptome assay, for instance the MI Transcriptome™ assay (Caris Molecular Intelligence®, Caris Life Sciences). The assay detects gene fusions and splice variants using the Agilent SureSelect Human All Exon Panel when sequences on the Illumina NovaSeq instrument.

### Example 10: Fluorescence In Situ Hybridization (FISH)

[1352] FISH by break apart probes is carried out on circulating tumor cells (CTC) obtained from plasma or blood or other liquid biopsy samples. For instance, circulating tumor cells are purified from plasma, serum etc using either CellSearch® (Menarini silicon biosystems, Italy) or ISET® (Rarecells Diagnostics, Paris, France) systems and fixed on slides.

[1353] Briefly the CTCs enriched from whole blood are mounted on individual glass slides (Frithiof, Henrik et al. OncoTargets and therapy vol. 9, 7095-7103, 16 Nov. 2016). CTC-containing solution (˜900 μL) is transferred to a 1.5 mL Eppendorf tube and placed in a magnetic tray. Following 10 min incubation, the nonadherent solvent is removed. Cells are resuspended in 10 μL of 1× phosphate buffer saline and mounted on superfrost slides (ThermoScientific, Germany) which are incubated at 37° C. for 30 min. Fixation is accomplished by immersing the slides in 100% methanol for 5 min. Samples are stored at −20° C. until further evaluation.

[1354] Pretreatment of the cells is done using ZytoLight® FISH-Tissue Implementation Kit (Zyto Vision, Cat. No. Z-2028-5). Buffers PT1, ES1, WB1, WB2 and MT7 are provided in the kit.

[1355] Slides are incubated for 10 min at 70° C., followed by incubation for 2×10 min in xylene. The slides are then rehydrated using an ethanol series of 100%, 100%, 90%, 70% ethanol for 5 min each and finally washed 2×2 min in deionized or distilled water. Slides are incubated for 15 min in pre-warmed Heat Pretreatment Solution Citric (PT1) at 98° C. and transferred immediately to deionized or distilled water for washing 2×2 min. After blotting off the water, Pepsin Solution (ES1) is applied to the specimen and incubated for 15 min at 37° C. in a humidity chamber and washed for 5 min in Wash Buffer SSC (WB1). The slides are washed for 1 min in deionized water, dehydrated in an ethanol series with 70%, 90%, and 100% ethanol each for 1 min and air dried.

[1356] The ZytoLight SPEC NRG1 Dual Color Break Apart Probe (PL140) consists of ZyGreen and ZyOrange labeled polynucleotides. These probes target sequences that map to both the distal and the proximal sides of a breakpoint as occurred in a gene of interest, e.g. VAPB, CADM1, CD44, SLC3A2, VTCN1, CDH1, CXADR, GTF2E2, CSMD1, PTN, ST14, AGRN, THBS1 or PVALB. 10 μl probe is pipetted onto each pretreated specimen, covered with a 22 mm×22 mm coverslip and sealed. Denaturation is done by placing the slides in a hybridizer for 10 min at 75° C. following which the slides are transferred to a humidity chamber and hybridized overnight at 37° C.

[1357] On the next day, slides are submerged in 1× Wash Buffer A (WB2) at 37° C. for 1-3 min to remove the coverslip and washed again for 2×5 min at 37° with Wash Buffer A. Slides are incubated in 70%, 90% and 100% ethanol for 1 min each and air dried. 25 μl of DAPI/DuraTect-Solution (MT7) is pipetted onto the slides, covered with a coverlip and incubated in the dark for 15 min. Sample fluorescence is then evaluated by fluorescence microscopy using the appropriate filters for ZyGreen (excitation 503 nm/emission 528 nm) and for ZyOrange (excitation 580 nm/emission 599 nm). Results are interpreted based on the overlapping or non-overlapping appearance of green and orange signals.

### Example 11: Immunocytochemistry (ICC)

[1358] Immunocytochemistry is carried out on circulating tumor cells obtained from plasma or blood or other liquid biopsy samples to detect the expression of the NRG1 fusion protein. Circulating tumor cells are purified from plasma, serum etc using either CellSearch® (Menarini silicon biosystems, Italy) or ISET® (Rarecells Diagnostics, Paris, France) systems and fixed on slides.

[1359] Briefly the CTCs enriched from whole blood are mounted on individual glass slides (Frithiof, Henrik et al. OncoTargets and therapy vol. 9, 7095-7103, 16 Nov. 2016). The CTC-containing solution (˜900 μL) is transferred to a 1.5 mL Eppendorf tube and placed in a magnetic tray. Following 10 min incubation, the nonadherent solvent is removed. Cells are resuspended in 10 μL of 1× phosphate buffer saline and mounted on superfrost slides (ThermoScientific, Germany) which are incubated at 37° C. for 30 min. Fixation is accomplished by immersing the slides in 100% methanol for 5 min. Samples are stored at −20° C. until further evaluation.

[1360] Following fixation, detection of proteins on the slides is carried out using an appropriate immunostaining system (For example Ventana Discovery automated immunostaining system, Ventana Medical Systems, Tucson, AZ, USA). Briefly, cells mounted on superfrost slides are pretreated at pH 8.0 in an EDTA-based buffer. Two primary antibodies are applied to the NRG1 fusions of the present disclosure. For example, an anti-NRG1 antibody, targeting a region which is positioned at the C-terminal side of the fusion junction (such as the EGFR domain of NRG1) and another primary antibody targeting an epitope or domain of CD44 which is positioned N-terminal of the fusion junction. Antibody dilutions are performed with an appropriate diluent. The antibodies are detected using appropriate secondary antibodies and two different fluorescence detection systems. Immunostaining is visualized using different channels in a fluorescence microscope. Results are interpreted based on the overlapping or non-overlapping appearance of the two fluorescence signals.

### Example 12: Treatment Protocol

[1361] Treatment with zenocutuzumab in a patient diagnosed with each of the following fusion: VAPB-NRG1, CADM1-NRG1, CD44-NRG1, SLC3A2-NRG1, VTCN1-NRG1, CDH1-NRG1, CXADR-NRG1, GTF2E2-NRG1, CSMD1-NRG1, PTN-NRG1, ST14-NRG1, THBS1-NRG1, AGRN-NRG1, PVALB-NRG1, APP-NRG1, WRN-NRG1, DAAM1-NRG1, ASPH-NRG1, NOTCH2-NRG1, CD74-NRG1, SLC4A4-NRG1, SDC4-NRG1, ZFAT-NRG1 and DSCAML1-NRG1 is as follows.

[1362] A bi-weekly schedule is followed consisting of dosing 750 mg of zenocutuzumab over four hours for the first infusion followed by a two-hour dosing for each subsequent infusion every other week in a 4-week cycle. Also, premedication is included to manage IRRs (Infusion Related Reactions), which consists of antipyretics and antihistamines for all infusions. Corticosteroids are included prior to the Day 1 cycle 1 dose; thereafter they are administered according to the investigator's discretion to manage IRRs.

### Example 13: Patient-Derived VAPB-NRG1 Fusion Data

[1363] A paraffin fixed sample of tumorous material with 60% tumorous cells from the right parietal pleura obtained from a 68-year old male patient diagnosed with lung adenocarcinoma was obtained on which molecular biotechnological analyses were performed as follows.

[1364] An Archer FusionPlex™ panel that allows detection in a panel of 14 genes (ALK, BRAF, EGFR, FGFR1, FGFR2, FGFR3, KRAS, MET, NRG1, NTRK1, NTRK2, NTRK3, RET, ROS1) was used. Libraries were prepared according to the manufacturer's instructions and Next Generation Sequencing (NGS) was performed on an Illumina MiSeq machine and sample analysis was done using the Archer Analysis 6.0 site.

[1365] The sample tested positive for a VAPB-NRG1 fusion in this panel. Sequencing performed on the sample led to the identification of the sequence according to SEQ ID NO: 3. It revealed the presence of a fusion junction between exon 1 of VAPB and exon 2 of NRG1. The underlined sequence, nucleotides 1-43, corresponds to a portion of exon 1 of the gene coding for VAPB (NM_004738.4). Nucleotides 44-94 correspond to a portion of the gene coding for NRG1.

(SEQ ID NO: 3)
CAGGTCCTGAGCCTCGAGCCGCAGCACGAGCTCAAATTCCGAGCCTTGC
CTCCCCGATTGAAAGAGATGAAAAGCCAGGAATCGGCTGCAGGTT.

### Example 14: Patient-Derived CADM1-NRG1 Fusion Data

[1366] A formalin-fixed paraffin block with tumorous material from a male patient, diagnosed with metastatic lung adenocarcinoma NOS, was obtained on which molecular biotechnological analyses were performed as follows.

[1367] Molecular testing was performed after harvesting of metastatic brain tissue with an approved microdissection technique. Candidate slides were examined under a microscope and areas containing tumor cells (and separately normal cells, when necessary for testing) were circled. A laboratory technician harvested targeted tissue for extraction from the marked areas using a dissection microscope. The areas marked and extracted were microscopically reexamined on post microdissected slides and adequacy of microdissection was reviewed.

[1368] RNA-Seq performed on cDNA obtained from the sample led to the identification of the sequence according to SEQ ID NO: 7. It revealed the presence of an in-frame fusion with a junction occurring between exon 7 of the CADM1 gene and exon 6 of the NRG1 gene. The underlined sequence, nucleotides 1-53, corresponds to a portion of exon 7 of the CADM1 gene (NM_001301045.1). Nucleotides 54-85 correspond to a portion of the gene coding for NRG1 (NM_001159999.3).

(SEQ ID NO: 7)
AGCTTCAAACATAGTGGGGAAAGCTCACTCGGATTATATGCTGTATGTA
TACGCTACATCTACATCCACCACTGGGACAAGCCAT

[1369] A tumor mutational burden analysis was performed based on Next Generation Sequencing (NGS) analysis from genomic DNA isolated from the formalin-fixed paraffin embedded tumor sample using the Illumina NextSeq platform. Tumor mutational burden is calculated using only missense mutations that have not been previously reported as germline alterations. A high mutational burden is a potential indicator of immunotherapy response (Hellman et al., NEJM, 2018; Le et al., NEJM, 2015; Rizvi et al., Science, 2015; Rosenberg et al., Lancet 2016; Snyder et al., NEJM, 2014). Cut-off points in NSCLC are based on a large Phase 3 clinical trial which showed that patients with a TMB of 10 or more mutations per megabase had longer progression free survival when treated with immune checkpoint inhibitor combination therapy than those treated with chemotherapy (Hellman et al., NEJM, 2018). High: greater than or equal to 10 mutations/megabase, and Low: less than or equal to 9 mutations per megabase. The patient sample had a TMB score of 9.

[1370] Microsatellite Instability (MSI) analysis performed on the sample by NGS showed a stable MSI signature. MSI status by NGS (MSI-NGS) was measured by the direct analysis of known microsatellite regions sequenced in a panel of 592 known genes. To establish clinical threshold, MSI-NGS results were compared with results from over 2,000 matching clinical cases analyzed with traditional, PCR-based methods. Genomic variants in the microsatellite loci are detected using the same depth and frequency criteria as used for mutational detection. Only insertions and deletions resulting in a change in the number of tandem repeats were considered in this assay. The total number of microsatellite alterations in each sample were counted and grouped into three categories: High, Equivocal and Stable. MSI-low results are reported in the Stable category.

[1371] Immunohistochemistry performed on the sample revealed a negative result for ALK and PD-L1, and positive results for MLH1, MSH2, MSH6, PMS2 and PTEN.

[1372] Using NGS or RNA-Seq analysis, no fusions or mutations were detected in the obtained sample in the following cancer type relevant biomarkers: NTRK1, NTRK2, NTRK3, KRAS, ALK, DOR2, ErbB2, ErbB3, ErbB4, PIK3CA, TP53, MET, PD-L1, RET, ROS1, STKI1, TP53.

### Example 15: Patient-Derived CD44-NRG1 Fusion and Patient Data

[1373] A biological sample of tumorous material from the liver of a 46-year old male patient was obtained on which molecular biotechnological analyses were performed as follows.

[1374] An Archer FusionPlex™ Custom Solid Panel that utilizes the Anchored Multiplex PCR (AMP™) technology targeting 62 exons of previously reported chromosomal rearrangements was used to detect gene fusions in the tumor sample. Unidirectional gene specific primers (GSPs) were designed to 62 targeted exons. GPSs in combination with adapters-specific primers amplify known and novel fusion transcripts. Enriched amplicons were sequenced on an Illumina MiSeq instrument.

[1375] The sample tested positive for a CD44-NRG1 fusion in this investigational panel. Sequencing performed on the sample led to the identification of the sequence according to SEQ ID NO: 11. It revealed the presence of an in-frame fusion with a fusion junction occurring between exon 5 of CD44 and exon 2 of NRG1. The underlined sequence, nucleotides 1-52, corresponds to a portion from exon 5 of the CD44 gene (NM_000610). Nucleotides 53-110 correspond to a portion of exon 2 of the gene coding for NRG1.

(SEQ ID NO: 11)
GACGAAGACAGTCCCTGGATCACCGACAGCACAGACAGAATCCCTGCTA
CCACCTTGCCTCCCCGATTGAAAGAGATGAAAAGCCAGGAATCGGCTGC
AGGTTCCAAACT

[1376] The sample tested negative in this clinically validated panel with a total of 62 exon targets for exon 20 of ALK (NM_004304), exons 2,4,8 of ERG (NM_004449), exons 6,7,8,10,11 of EWSR1 (NM_005243), exons 17,18 of FGFR3 (NM_00142), exon 17 of FGFR2 (NM_00141.4), exon 2 of FOXO1 (NM_002015), exons 11,12,14,15 of NTRK3 (NM_002530), exon 12 of RET (NM_020975), exons 34,35 of ROS (NM_002944), exon 10 of SS18 (NM_001007559), exons 16,17,19 of STAT6 (NM_001178078), exon 6 of TAF15 (NM_139215), exon 6 of TFE3 (NM_006521), exons 7,9,11 of BRAF (NM_004333), exon 12 of NTRK1 (NM_002529), exons 5,8 of FUS (NM_004960), exon 20 of CIC (NM_015125).

### Example 16: Patient-Derived SLC3A2-NRG1 Fusion Data

[1377] Tumorous material showing adenocarcinoma histology of primary origin obtained via a left lower lobectomy from a female patient diagnosed with lung adenocarcinoma was obtained on which molecular biotechnological analyses were performed as follows.

[1378] Molecular testing was performed using Archer Lung Fusion Plex, Illumina MiniSEQ after harvesting of tumorous cells by sequencing of the following target genes: ALK, BRAF, FGFR1, FGFR2, FGFR3, KRAS, MET, NRG1, NTRK1, NTRK2, NTRK3, RET, ROS1. The reference genome was GRCh37/hg19.

[1379] RNA-Seq performed on cDNA obtained from the sample led to the identification of the sequence according to SEQ ID NO: 15. It revealed the presence of an in-frame fusion junction occurring between exon 1 of the SLC3A2 gene and exon 5 of the NRG1 gene. The underlined sequence, nucleotides 1-53, corresponds to a portion of exon 1 of the gene coding for SLC3A2 (NM_001013251). The remaining 35 nucleotides, nucleotides 54-88, correspond to a portion of exon 5 of the NRG1 gene.

(SEQ ID NO: 15)
CCGCATCGGCGACCTTCAGGCCTTCCAGGGCCACGGCGCGGGCAACCTG
GCGGCATCTACATCTACATCCACCACTGGGACAAGCCAT.

### Example 17: Patient-Derived VTCN1-NRG1 Fusion Data

[1380] Metastatic tumorous biopsy material from a selected tissue block comprising tumorous cells was obtained from the right parasternal site from a patient diagnosed with a lung adenocarcinoma on which molecular biotechnological analyses were performed as follows.

[1381] Molecular testing was performed using the Archer Fusion Plex RNA CTL_V6 (Archerdx) kit, on material obtained after harvesting of tumorous cells and TNA extraction by sequencing as realized via Nextseq pair end using flow cell N^{o}HFFJFAFX2, with Sophia DDM version 5.7.4-b127-31a209c, Pipeline ID ILL1AM1R2/v5.5.24.1/GEN1GN1FSQ2.

[1382] The indicated kit allows detection of the mutations in the following target regions (with exons in brackets): AKT1 (3), ALK (22, 23, 24, 25), AXL (5, 11, 15, 17), BRAF (11, 15), CTNNB1 (3), CYSLTR2 (6), DDR2 (17), EGFR (18, 19, 20, 21), ERBB2 (20), FGFR1 (2, 8, 9, 10, 17), FGFR2 (2, 5, 7, 8, 9, 10), FGFR3 (3, 5, 8, 9, 10), GNA11 (4,5), GNAS (8, 9), GNAQ (4,5), HRAS (2, 3, 4), IDH1 (4), IDH2 (4), KEAP1 (full), KIT (11, 13, 17), KRAS (2, 3, 4), MAP2K1 (2, 3), MET (13 à 19), NRAS (2, 3, 4), PIK3CA (9, 20), POLE (9 à 14), RAF1 (4, 5, 6, 7, 9, 10, 11, 12), RET (11, 13, 14, 15, 16), ROS1 (38), STK11 (full), TP53 (full). Detection of transcriptional fusions of: ALK, AXL, BRAF, CCND1, EGFR, FGFR1, FGFR2, FGFR3, MAP2K1, MET, NRG1, NTRK1, NTRK2, NTRK3, PPARG, RAF1, RET, ROS1. And expression of: ALK, CCND1, EGFR, ERBB2, FGFR1, FGFR2, FGFR3, MET, NTRK1, NTRK2, NTRK3, RET, ROS1.

[1383] No mutations were observed in exons 18-21 of the EGFR gene; no mutations were detected in exons 2 and 3 of the KRAS gene; no mutations were detected in exons 11 and 15 of the BRAF gene; no mutations were detected in exon 20 of the ERBB2 gene; no mutations were detected in exons 9 and 20 of the PIK3CA gene; no mutations were detected in exon 14 of the MET gene; mutation 395G>T was detected in exon 4 of the IDH1 gene, leading to an R132L amino acid change and a transcriptional fusion between exon 2 of VTCN1 and exon 2 of NRG1 was detected.

[1384] No transcriptional fusions implicating ALK, ROS1, RET, NTRK1, NTRK2, NTRK3, FGFR1, FGFR2 and FGFR3 genes were detected.

[1385] No overexpression of ERBB2 or MET was detected.

[1386] RNA-Seq performed on cDNA obtained from the sample led to the identification of the sequence according to SEQ ID NO: 166. It revealed the presence of an in-frame fusion junction occurring between exon 2 of the VTCN1 gene and exon 2 of NRG1. The underlined sequence, nucleotides 1-65, corresponds to a portion of exon 2 of the gene coding for VTCN1, accession number NM_024626.4. The remaining 28 nucleotides, nucleotides 66-93, correspond to a portion of exon 2 of NRG1.

(SEQ ID NO: 166)
CATAATTAGCATCATCATTATTCTGGCTGGAGCAATTGCACTCATCATT
GGCTTTGGTATTTCAGCCTTGCCTCCCCGATTGAAAGAGATGAA.

### Example 18: Patient-Derived CDH1-NRG1 Fusion Data

[1387] Tumorous material was obtained from a female patient diagnosed with pancreatic adenocarcinoma, on which molecular biotechnological analyses were performed as follows. Automated RNA extraction was performed with the Maxwell (Promega) FFPE LEV kit.

[1388] Molecular testing was performed using Archer Fusion Plex NGS. NGS was performed (S5XL—Life Technologies) on the Oncomine Comprehensive Assay V3 (OCAV3) panel that contains 161 genes, of which 81 are considered hotspot genes and 48 full-length genes, and 47 copy number genes. RNA-Seq performed on cDNA obtained from the sample led to the identification of the sequence according to SEQ ID NO: 186.

[1389] It revealed the presence of an in-frame fusion junction occurring between exon 11 of the CDH1 gene and exon 2 of NRG1. The underlined sequence, nucleotides 1-119, corresponds to a portion of exon 11 of the gene coding for CDH1 (NM_001317185.2). The remaining 30 nucleotides, nucleotides 120-149, correspond to a portion of exon 2 of the NRG1 gene. Also, NGS revealed the presence of mutation 1172C>T in exon 10 of the FGFR3 gene, giving rise to the amino acid change Ala391Val.

(SEQ ID NO: 186)
CTGGCTGGAGATTAATCCGGACACTGGTGCCATTTCCACTCGGGCTGAG
CTGGACAGGGAGGATTTTGAGCACGTGAAGAACAGCACGTACACAGCCC
TAATCATAGCTACAGACAATGCCTTGCCTCCCCGATTGAAAGAGATGAA
A.
CCTTGCCTCCCCGATTGAAAGAGATGAAAA

### Example 19: Patient-Derived CXADR-NRG1 Fusion Data

[1390] Tumorous material was obtained from a male patient diagnosed with colon cancer, on which molecular biotechnological analyses were performed as follows. Areas of tumor of submitted a tissue specimen or slides microdissected from surrounding tissue, and total RNA isolated using standard methods. The isolated RNA was subjected to reverse transcription, and double stranded DNA was constructed. The specimen was universal-tagged and barcoded, and subjected to hemi-nested multiplex PCR using gene-specific primers and universal tag specific primers (Archer FusionPlex chemistry). The products were prepared and sequenced using Illumina NextSeq v2 chemistry. Sequence data was analyzed using Archer Analysis Software, v4.1. The analytic sensitivity is approximately 5 RNA molecules encoding the fusion and is dependent on the specific fusion event present. Fusions are relative to the reported reference transcript.

[1391] Molecular analyses revealed the presence of an in frame fusion junction occurring between exon 1 of the CXADR gene and exon 2 of NRG1. The underlined sequence, nucleotides 1-43, corresponds to a portion of exon 1 of the gene coding for CXADR (NM_001207063.2). The remaining 58 nucleotides, nucleotides 44-101, correspond to a portion of exon 2 of the NRG1 gene.

(SEQ ID NO: 217)
ATGGCGCTCCTGCTGTGCTTCGTGCTCCTGTGCGGAGTAGTGGCCTTGC
CTCCCCGATTGAAAGAGATGAAAAGCCAGGAATCGGCTGCAGGTTCCAA
ACT.

### Example 20: Patient-Derived GTF2E2-NRG1 Fusion Data

[1392] A formalin-fixed paraffin block with tumorous material from a female patient, diagnosed with metastatic breast adenocarcinoma, NOS, was obtained on which molecular biotechnological analyses were performed as follows.

[1393] Molecular testing was performed after harvesting of tissue with an approved microdissection technique. Candidate slides were examined under a microscope and areas containing tumor cells (and separately normal cells, when necessary for testing) were circled. A laboratory technician harvested targeted tissue for extraction from the marked areas using a dissection microscope. The areas marked and extracted were microscopically reexamined on post-microdissected slides and adequacy of microdissection was reviewed.

[1394] Gene fusion and variant transcript detection were performed on mRNA isolated from a formalin-fixed paraffin embedded tumor sample using the Agilent SureSelectXT Low Input Library prep chemistry, optimized for FFPE tissue, in conjunction with the SureSelect Human All Exon V7 bait panel (48.2 Mb) and the Illumina NovaSeq. This assay is designed to detect fusions occurring at known and novel breakpoints within genes. This analysis led to the identification of the sequence according to SEQ ID NO: 233. It revealed the presence of an in frame fusion with a junction occurring between exon 2 of the GTF2E2 gene and exon 2 of the NRG1 gene. The underlined sequence, nucleotides 1-141, corresponds to a portion of exon 2 of the GTF2E2 gene (NM_002095.6). Nucleotides 142-268 correspond to a portion of the gene coding for NRG1 (NM_001159999.3).

(SEQ ID NO: 233)
GGGAGCTGTTCAAAAAACGAGCTCTTTCTACTCCTGTAGTAGAAAAACG
TTCAGCATCTTCTGAGTCATCATCATCATCGTCAAAGAAGAAGAAAACA
AAGGTAGAACATGGAGGATCGTCAGGCTCTAAACAAAATTCTGCCTTGC
CTCCCCGATTGAAAGAGATGAAAAGCCAGGAATCGGCTGCAGGTTCCAA
ACTAGTCCTTCGGTGTGAAACCAGTTCTGAATACTCCTCTCTCAGATTC
AAGTGGTTCAAGAATGGGAATGA

[1395] A tumor mutational burden (TMB) analysis was performed based on Next Generation Sequencing (NGS) analysis from genomic DNA isolated from the formalin-fixed paraffin embedded tumor sample using the Illumina NextSeq platform. Tumor Mutational Burden is calculated using only missense mutations that have not been previously reported as germline alterations. Defined threshold levels for Tumor Mutational Burden and establish cutoff points were used as follows:
[1396] High: greater than or equal to 17 mutations/Megabase (≥17 mutations/Mb).
[1397] Intermediate: greater than or equal to 7 but fewer than 17 mutations/Megabase (≥7 and <17 mutations/Mb).
[1398] Low: less than or equal to 6 mutations/Megabase (≤6 mutations/Mb). The patient sample indicated a TMB score of 9.

[1399] Using Microsatellite Instability (MSI) analysis by NGS, no microsatellite instability was detected.

[1400] Using NGS analysis, a frameshift mutation was detected in exon 6 of GATA3 (c.1305_1327del23, protein alteration P436fs) and loss-off function variant NTRK2 (protein alteration p.Q172 c.514C>T, (NM_006180.4).

### Example 21: Patient-Derived CSMD1-NRG1 Fusion Data

[1401] Tumorous material was obtained from a male patient diagnosed with colorectal cancer, on which the following molecular biotechnological analyses were performed.

[1402] A custom oncology testing panel consisting of 596 genes with single nucleotide variants, indels and translocations was using hybrid-capture next generation sequencing. Whole genome transcriptome RNA sequencing was performed using IDT xGen Exome research panel v1.0 hybridization probes allowing unbiased detection of expressed fusion transcripts from rearranged genes.

[1403] It revealed the presence of an in-frame fusion junction occurring between exon 23 of the CSMD1 gene and exon 6 of NRG1. The underlined sequence, nucleotides 1-88, corresponds to a portion of exon 23 of the gene coding for CSMD1 (NM_033225.6). The remaining nucleotides, nucleotides 89-150, correspond to a portion of exon 6 of the NRG1 gene. The relevant patient report mentioned Afatinib and Erlotinib as FDA approved therapies related to this CSMD1-NRG1 fusion, while GSK2849330 was mentioned as an investigational study. Also, clinical trial TAPUR (NCT02693535) was mentioned in relation to the CSMD1-NRG1 fusion.

[1404] No pathogenic germline mutations were identified in patient material, neither were pathogenic single nucleotide polymorphisms identified in KRAS or NRAS. The following four somatic genomic variants were identified in patient material: A Y220C missense mutation in TP53, a R564* stop gain mutation in APC, an N1455fs frame shift mutation in APC and a G469A missense mutation in BRAF. The MSI status was established as being stable and a tumor mutational burden of 4.6m/MB.

[1405] Identified variants of unknown significance included c.3332+1G>A splice region variant in APOB (NM_000384), c.425C>T p.S142L missense variant in GATA3 (NM_001002295), c.352C>T p.R118C missense variant in LZTR1 (NM_006767), c.227A>T p.H76L missense variant in CTC1 (NM_025099), c.239G>A p.R80H missense variant in CYP1B1 (NM_000104), c.1099C>T p.R367W missense variant in RECQL4 (NM_004260), c.871A>G p.R291G missense variant in SOX2 (NM_003106) and c85_87del pE29del in frame deletion in TCF7L2 (NM_001146274).

[1406] Prior treatment of the patient included Fluorouracil, Leucovorin, Irinotecan, Bevacizumab and Oxaliplatin.

(SEQ ID NO: 255)
ATCCTAAACAGCACATCCAATCACCTGTGGCTAGAGTTCAACACCAATG
GATCTGACACCGACCAAGGTTTTCAACTCACCTATACCACTACATCTAC
ATCCACCACTGGGACAAGCCATCTTGTAAAATGTGCGGAGAAGGAGAAA
ACT.

### Example 22: Patient-Derived PTN-NRG1 Fusion Data

[1407] A formalin fixed paraffin block with tumorous material from a female patient, diagnosed with metastatic breast carcinoma, NOS, was obtained on which molecular biotechnological analyses were performed as follows.

[1408] Molecular testing was performed after harvesting of tissue with an approved microdissection technique. Candidate slides were examined under a microscope and areas containing tumor cells (and separately normal cells, when necessary for testing) were circled. A laboratory technician harvested targeted tissue for extraction from the marked areas using a dissection microscope. The areas marked and extracted were microscopically reexamined on post-microdissected slides and adequacy of microdissection was reviewed.

[1409] Gene fusion and variant transcript detection were performed on mRNA isolated from a formalin-fixed paraffin embedded tumor sample using the Agilent SureSelectXT Low Input Library prep chemistry, optimized for FFPE tissue, in conjunction with the SureSelect Human All Exon V7 bait panel (48.2 Mb) and the Illumina NovaSeq. This assay is designed to detect fusions occurring at known and novel breakpoints within genes. This analysis led to the identification of the sequence according to SEQ ID NO: 313. It revealed the presence of an in frame fusion with a junction occurring between exon 4 of the PTN gene and exon 2 of the NRG1 gene. The underlined sequence, nucleotides 1-102, corresponds to a portion of exon 2 of the PTN gene (NM_001321386.2). Nucleotides 103-205 correspond to a portion of the gene coding for NRG1 (NM_001159999.3).

(SEQ ID NO: 313)
CCAGAACTGGAAGTCTGAAGCGAGCCCTGCACAATGCCGAATGCCAGAA
GACTGTCACCATCTCCAAGCCCTGTGGCAAACTGACCAAGCCCAAACCT
CAAGCCTTGCCTCCCCGATTGAAAGAGATGAAAAGCCAGGAATCGGCTG
CAGGTTCCAAACTAGTCCTTCGGTGTGAAACCAGTTCTGAATACTCCTC
TCTCAGATT

[1410] A tumor mutational burden (TMB) analysis was performed based on Next Generation Sequencing (NGS) analysis from genomic DNA isolated from the formalin-fixed paraffin embedded tumor sample using the Illumina NextSeq platform. Tumor Mutational Burden is calculated using only missense mutations that have not been previously reported as germline alterations. Defined threshold levels for Tumor Mutational Burden and establish cutoff points were used as follows:
[1411] High: greater than or equal to 17 mutations/Megabase (≥17 mutations/Mb).
[1412] Intermediate: greater than or equal to 7 but fewer than 17 mutations/Megabase (≥7 and <17 mutations/Mb).
[1413] Low: less than or equal to 6 mutations/Megabase (≤6 mutations/Mb). The patient sample indicated a low TMB score.

[1414] Using Microsatellite Instability (MSI) analysis by NGS, no microsatellite instability was detected.

[1415] Using NGS analysis, a p.E336*, c. 1006G>T mutation in exon 10 of TP53 was detected (NM_000546.5). No alterations were detected in NTRK1/2/3, AKT1, BRCA1/2, ERBB2, ESR1, PIK3CA, PTEN and negative IHC results were obtained for PD-L1 (based on 22c3 and SP142).

### Example 23: Patient-Derived ST14-NRG1 Fusion Data

[1416] Molecular analyses performed on tumorous material obtained from a patient diagnosed with non-small cell lung cancer revealed the presence of an in-frame fusion junction occurring between exon 11 of the ST14 gene and exon 6 of NRG1 comprised by the sequence according to SEQ ID NO: 330. The underlined sequence, nucleotides 1-95, corresponds to a portion of exon 11 of the gene coding for ST14 (NM_021978.4). The remaining 87 nucleotides, nucleotides 96-182, correspond to a portion of exon 6 of the NRG1 gene.

(SEQ ID NO: 330)
CAACAGCAACAAGATCACAGTTCGCTTCCACTCAGATCAGTCCTACACC
GACACCGGCTTCTTAGCTGAATACCTCTCCTACGACTCCAGTGACCCTA
CATCTACATCCACCACTGGGACAAGCCATCTTGTAAAATGTGCGGAGAA
GGAGAAAACTTTCTGTGTGAATGGAGGGGAGTGCT.

### Example 24: Patient-Derived THBS1-NRG1 Fusion Data

[1417] Fresh, frozen or a formalin-fixed paraffin block with tumorous material from which tumor DNA was extracted obtained from a patient diagnosed with pancreatic adenocarcinoma was obtained on which molecular biotechnological analyses were performed as follows.

[1418] Extracted DNA was surveyed for the presence of exonic DNA sequences of 447 cancer genes and 191 regions across 60 genes for detection of rearrangements. DNA was isolated from tissue containing at least 20% tumor nuclei and analyzed by massively parallel sequencing using a solution phase Agilent SureSelect hybrid capture kit and Illumina HiSeq 2500 sequencer.

[1419] Molecular analyses revealed the presence of an in-frame fusion junction occurring between exon 9 of the THBS1 gene and exon 6 of NRG1 comprised by the sequence according to SEQ ID NO: 376. The underlined sequence, nucleotides 1-56, corresponds to a portion of exon 9 of the gene coding for THBS1 (NM_003246.4). Nucleotides 57-145 correspond to a portion of exon 6 of the NRG1 gene.

(SEQ ID NO: 376)
ACCCTGTGAAGGCGAAGCGCGGGAGACCAAAGCCTGCAAGAAAGACGCC
TGCCCCACTACATCTACATCCACCACTGGGACAAGCCATCTTGTAAAAT
GTGCGGAGAAGGAGAAAACTTTCTGTGTGAATGGAGGGGAGTGCTTC.

[1420] Further molecular analyses did not reveal a fusion in ALK, NTRK1, NTRK2, NTRK3, ROS1 and no pathogenic mutations, copy number changes or structural variants involving BRCA1, BRCA2 or PALB2 were detected. The following mutations were identified: c.783-10_787delinsCCTG in TP53, a single copy deletion of TP53 at 17p13.1, c.* 178T>A, exon 3 of CDKN1B, c.1205A>C (p.N402T) in exon 12 of ERCC2, c. 1858T>C (p.C620R) in exon 21 of FANCD2, c.398A>C (p.N133T) in exon 5 of KIF1B, c. 1092-7T>C in NAB2, c.3245G>A (p.R1082H) in exon 20 of NOTCH1, c.1798C>T (p.R600W) in exon 13 of PTPN14 and c.1273C>A (p.H425N) in exon 9 of RASA1.

### Example 25: Patient-Derived AGRN-NRG1 Fusion Data

[1421] Tumorous material was obtained from a male patient diagnosed with pancreatic cancer (PDAC), on which the following molecular biotechnological analyses were performed.

[1422] A custom oncology testing panel consisting of 648 genes with single nucleotide variants, indels and translocations was using hybrid-capture next-generation sequencing. Whole-genome transcriptome RNA sequencing was performed allowing unbiased detection of expressed fusion transcripts from rearranged genes. The limit of detection of the assay is 5% variant allele fraction (VAF) with a sensitivity of 98.2% for single nucleotide variants, 5% VAF with sensitivity of 91.8% for indels and 91.7% sensitivity for translocations.

[1423] This analysis led to the identification of the sequence according to SEQ ID NO: 403. It revealed the presence of an in-frame fusion with a junction occurring between exon 12 of the AGRN gene and exon 6 of the NRG1 gene. The underlined sequence, nucleotides 1-106, corresponds to a portion of exon 12 of the AGRN gene (NM_001305275.2). Nucleotides 107-207 correspond to a portion of the gene coding for NRG1 (NM_001159999.3).

(SEQ ID NO: 403)
GTGTGCGGCTCAGATGGGGTCACCTACAGCACCGAGTGTGAGCTG
AAGAAGGCCAGGTGTGAGTCACAGCGAGGGCTCTACGTAGCGGCC
CAGGGAGCCTGCCGAGCTACATCTACATCCACCACTGGGACAAGC
CATCTTGTAAAATGTGCGGAGAAGGAGAAAACTTTCTGTGTGAAT
GGAGGGGAGTGCTTCATGGTGAAAGAC.

[1424] Also, overexpression of FGFR1 was detected.

### Example 26: Patient-Derived PVALB-NRG1 Fusion Data

[1425] Molecular analyses performed on tumorous material obtained from a patient diagnosed with non-small cell lung cancer revealed the presence of an in-frame fusion junction occurring between exon 4 of the PVALB gene and exon 6 of NRG1 comprised by the sequence according to SEQ ID NO: 437. The underlined sequence, nucleotides 1-102, corresponds to a portion of exon 4 of the gene coding for PVALB (NM_002854.3). Nucleotides 103-227 correspond to a portion of exon 6 of the NRG1 gene.

(SEQ ID NO: 437)
TAAAAGGCTTCTCCCCAGATGCCAGAGACCTGTCTGCTAAAGAAA
CCAAGATGCTGATGGCTGCTGGAGACAAAGATGGGGACGGCAAAA
TTGGGGTTGACGCTACATCTACATCCACCACTGGGACAAGCCATC
TTGTAAAATGTGCGGAGAAGGAGAAAACTTTCTGTGTGAATGGAG
GGGAGTGCTTCATGGTGAAAGACCTTTCAAACCCCTCGAGATACT
TG.

### Example 27: Patient-Derived SLC3A2-NRG1 Fusion Data

[1426] Tumorous material obtained from a patient diagnosed with a lung cancer on which molecular biotechnological analyses were performed as follows. Total RNA was extracted from a formalin-fixed paraffin block using a Maxwell RSC and ReliaPrep™ FFPE Total RNA Promega kit followed by Archer Dx CTL fusionplex. Bioinformatical analysis was performed using Archer Analysis Version 6.2.7.

[1427] This analysis revealed the presence of an in frame fusion junction occurring between exon 2 of the SLC3A2 gene and exon 6 of the NRG1 gene comprised by the sequence according to SEQ ID NO: 454. The underlined sequence, nucleotides 1-93, corresponds to a portion of exon 2 of the gene coding for SLC3A2 (NM_002394.6). Nucleotides 94-121 correspond to a portion of exon 6 of the NRG1 gene.

(SEQ ID NO: 454)
AGTTGGGGTCTCACTGTGTTGCCCAGACTGGTCTCGAACTCTTGG
CCTCAGGTGATCCTCTTCCCTCAGCTTCCCAGAATGCCGAGATGA
TAGCTACATCTACATCCACCACTGGGACAAG.

### Example 28: Patient-Derived APP-NRG1 Fusion Data

[1428] Tumorous material obtained from a patient diagnosed with a pancreatic cancer on which molecular biotechnological analyses were performed revealed the presence of an in-frame fusion junction occurring between exon 14 of the APP gene and exon 6 of the NRG1 gene comprised by the sequence according to SEQ ID NO: 486. The underlined sequence, nucleotides 1-54, corresponds to a portion of exon 14 of the gene coding for APP (NM_001136130.3). Nucleotides 55-141 correspond to a portion of exon 6 of the NRG1 gene.

(SEQ ID NO: 486)
TTGAGCCTGTTGATGCCCGCCCTGCTGCCGACCGAGGACTGACCA
CTCGACCAGCTACATCTACATCCACCACTGGGACAAGCCATCTTG
TAAAATGTGCGGAGAAGGAGAAAACTTTCTGTGTGAATGGAGGGG
AGTGCT

### Example 29: Patient-Derived WRN-NRG1 Fusion Data

[1429] Tumorous material obtained from a patient diagnosed with breast cancer on which molecular biotechnological analyses were performed revealed the presence of an in-frame fusion junction occurring between exon 33 of the WRN gene and exon 6 of the NRG1 gene comprised by the sequence according to SEQ ID NO: 528. The underlined sequence, nucleotides 1-96, corresponds to a portion of exon 33 of the gene coding for APP (NM_000553.6). Nucleotides 97-182 correspond to a portion of exon 6 of the NRG1 gene.

(SEQ ID NO: 528)
AAGCTGGCTGCCCCCTTGATTTGGAGCGAGCAGGCCTGACTCCAG
AGGTTCAGAAGATTATTGCTGATGTTATCCGAAACCCTCCCGTCA
ACTCAGCTACATCTACATCCACCACTGGGACAAGCCATCTTGTAA
AATGTGCGGAGAAGGAGAAAACTTTCTGTGTGAATGGAGGGGAGT
GC

### Example 30: Patient-Derived DAAM1-NRG1 Fusion Data

[1430] Tumorous material obtained from a patient diagnosed with a breast cancer on which molecular biotechnological analyses were performed revealed the presence of an in-frame fusion junction occurring between exon 1 of the DAAM1 gene and exon 1 of the NRG1 gene comprised by the sequence according to SEQ ID NO: 605. The underlined sequence, nucleotides 1-75, corresponds to a portion of exon 1 of the gene coding for DAAM1 (NM_001270520.2). Nucleotides 76-150 correspond to a portion of exon 1 of the NRG1 gene.

(SEQ ID NO: 605)
GAAGGAAACTGTTTAACCGGATCCCATTGTACCCAGAGTGCAGAG
CCGCCTTTCCAGCATGCAGGGGCTGCTCAGGACAGAGAGGGAGGA
GGCGCGCGGGGACGGGGACGCCCAGGAGGACCCACTCGCGGGTCC
CGCTCCGCTCCGGCA

### Example 31: Patient-Derived ASPH-NRG1 Fusion Data

[1431] Tumorous material obtained from a patient diagnosed with a colorectal adenocarcinoma on which molecular biotechnological analyses were performed revealed the presence of an in-frame fusion junction occurring between exon 22 of the ASPH gene and exon 2 of the NRG1 gene comprised by the sequence according to SEQ ID NO: 635. The underlined sequence, nucleotides 1-75, corresponds to a portion of exon 1 of the gene coding for ASPH (NM_001164750.2). Nucleotides 76-150 correspond to a portion of exon 2 of the NRG1 gene.

(SEQ ID NO: 635)
AAGGTCTCTTCCTGCCTGAGGATGAAAACCTGAGGGAAAAAGGGG
ACTGGAGCCAGTTCACGCTGTGGCAGCAAGCCTTGCCTCCCCGAT
TGAAAGAGATGAAAAGCCAGGAATCGGCTGCAGGTTCCAAACTAG
TCCTTCGGTGTGAAA

### Example 32: Patient-Derived NOTCH2-NRG1 Fusion Data

[1432] Tumorous material obtained from a patient diagnosed with a pancreatic cancer on which molecular biotechnological analyses were performed revealed the presence of an in-frame fusion junction occurring between exon 6 of the NOTCH2 gene and exon 6 of the NRG1 gene comprised by the sequence according to SEQ ID NO: 693. The underlined sequence, nucleotides 1-75, corresponds to a portion of exon 6 of the gene coding for NOTCH2 (NM_024408.4). Nucleotides 76-150 correspond to a portion of exon 6 of the NRG1 gene.

(SEQ ID NO: 693)
CCTCCTGTACTCCAGGCTCCACCTGCATCGACCGTGTGGCCTCCT
TCTCTTGCATGTGCCCAGAGGGGAAGGCAGCTACATCTACATCCA
CCACTGGGACAAGCCATCTTGTAAAATGTGCGGAGAAGGAGAAAA
CTTTCTGTGTGAATG

### Example 33: Patient-Derived CD74-NRG1 Fusion Data

[1433] Tumorous material obtained from a patient diagnosed with a lung cancer on which molecular biotechnological analyses were performed revealed the presence of an in-frame fusion junction occurring between exon 2 of the CD74 gene and exon 2 of the NRG1 gene comprised by the sequence according to SEQ ID NO: 717. The underlined sequence, nucleotides 1-75, corresponds to a portion of exon 2 of the gene coding for CD74 (NM_001025159.3). Nucleotides 76-150 correspond to a portion of exon 2 of the NRG1 gene.

(SEQ ID NO: 717)
AGGGCCGGCTGGACAAACTGACAGTCACCTCCCAGAACCTGCAGC
TGGAGAACCTGCGCATGAAGCTTCCCAAGCCCTTGCCTCCCCGAT
TGAAAGAGATGAAAAGCCAGGAATCGGCTGCAGGTTCCAAACTAG
TCCTTCGGTGTGAAA

### Example 34: Patient Derived SDC4-NRG1 Fusion Data

[1434] Tumorous material obtained from a patient diagnosed with a lung cancer on which molecular biotechnological analyses were performed revealed the presence of an in-frame fusion junction occurring between exon 2 of the SDC4 gene and exon 2 of the NRG1 gene comprised by the sequence according to SEQ ID NO: 743. The underlined sequence, nucleotides 1-75, corresponds to a portion of exon 2 of the gene coding for SDC4 (NM_002999.4). Nucleotides 76-150 correspond to a portion of exon 2 of the NRG1 gene.

(SEQ ID NO: 743)
TACCAGACGATGAGGATGTAGTGGGGCCCGGGCAGGAATCTGATG
ACTTTGAGCTGTCTGGCTCTGGAGATCTGGCCTTGCCTCCCCGAT
TGAAAGAGATGAAAAGCCAGGAATCGGCTGCAGGTTCCAAACTAG
TCCTTCGGTGTGAAA

### Example 35: Patient-Derived CD44-NRG1 Fusion Data

[1435] Tumorous material obtained from a patient diagnosed with a cancer on which molecular biotechnological analyses were performed revealed the presence of an in-frame fusion junction occurring between 5 exon of the CD44 gene and exon 6 of the NRG1 gene comprised by the sequence according to SEQ ID NO: 761. The underlined sequence, nucleotides 1-75, corresponds to a portion of exon 5 of the gene coding for CD44 (NM_000610.4). Nucleotides 76-150 correspond to a portion of exon 6 of the NRG1 gene.

(SEQ ID NO: 761)
TTTCTACTGTACACCCCATCCCAGACGAAGACAGTCCCTGGATCA
CCGACAGCACAGACAGAATCCCTGCTACCACTACATCTACATCCA
CCACTGGGACAAGCCATCTTGTAAAATGTGCGGAGAAGGAGAAAA
CTTTCTGTGTGAATG

### Example 36: Patient-Derived SLC4A4-NRG1 Fusion Data

[1436] Tumorous material obtained from a patient diagnosed with a pancreatic cancer on which molecular biotechnological analyses were performed revealed the presence of an in-frame fusion junction occurring between exon 14 of the SLC4A4 gene and exon 6 of the NRG1 gene comprised by the sequence according to SEQ ID NO: 765. The underlined sequence, nucleotides 1-75, corresponds to a portion of exon 14 of the gene coding for SLC4A4 (NM_001098484.3). Nucleotides 76-150 correspond to a portion of exon 6 of the NRG1 gene.

(SEQ ID NO: 765)
ACTACCCCATCAACTCCAACTTCAAAGTGGGCTACAACACTCTCT
TTTCCTGTACCTGTGTGCCACCTGACCCAGCTACATCTACATCCA
CCACTGGGACAAGCCATCTTGTAAAATGTGCGGAGAAGGAGAAAA
CTTTCTGTGTGAATG

### Example 37: Patient-Derived SDC4-NRG1 Fusion Data

[1437] Tumorous material obtained from a patient diagnosed with a lung cancer on which molecular biotechnological analyses were performed revealed the presence of an in-frame fusion junction occurring between exon 4 of the gene SDC4 and exon 2 of the NRG1 gene comprised by the sequence according to SEQ ID NO: 824. The underlined sequence, nucleotides 1-75, corresponds to a portion of exon 4 of the gene coding for SDC4 (NM_002999.4). Nucleotides 76-150 correspond to a portion of exon 2 of the NRG1 gene.

(SEQ ID NO: 824)
ATGTGTCCAACAAGGTGTCAATGTCCAGCACTGTGCAGGGCAGCA
ACATCTTTGAGAGAACGGAGGTCCTGGCAGCCTTGCCTCCCCGAT
TGAAAGAGATGAAAAGCCAGGAATCGGCTGCAGGTTCCAAACTAG
TCCTTCGGTGTGAAA

### Example 38: Patient-Derived ZFAT-NRG1 Fusion Data

[1438] Tumorous material obtained from a patient diagnosed with a lung cancer on which molecular biotechnological analyses were performed revealed the presence of an in-frame fusion junction occurring between exon 12 of the ZFAT gene and exon 6 of the NRG1 gene comprised by the sequence according to SEQ ID NO: 828. The underlined sequence, nucleotides 1-75, corresponds to a portion of exon 12 of the gene coding for ZFAT (NM_020863.4). Nucleotides 76-150 correspond to a portion of exon 6 of the NRG1 gene.

(SEQ ID NO: 828)
ACAGGAAGCACCCTAATGAGGAGTATGCCAACGTGGGCACCGGGG
AGCTGGCAGCGGAGGTGCTCATCCAGCAAGCTACATCTACATCCA
CCACTGGGACAAGCCATCTTGTAAAATGTGCGGAGAAGGAGAAAA
CTTTCTGTGTGAATG

### Example 39: Patient-Derived DSCAML1-NRG1 Fusion Data

[1439] Tumorous material obtained from a patient diagnosed with a pancreatic cancer on which molecular biotechnological analyses were performed revealed the presence of an in-frame fusion junction occurring between exon 3 of the gene DSCAML1 and exon 2 of the NRG1 gene comprised by the sequence according to SEQ ID NO: 868. The underlined sequence, nucleotides 1-75, corresponds to a portion of exon 3 of the gene coding for DSCAML1 (NM_020693.4). Nucleotides 76-150 correspond to a portion of exon 2 of the NRG1 gene.

(SEQ ID NO: 868)
GCCTCATCCCCTCTTCAGTGCAGGAATATGTTAGCGTTGTATCTT
GGGAGAAAGACACAGTCTCCATCATCCCAGCCTTGCCTCCCCGAT
TGAAAGAGATGAAAAGCCAGGAATCGGCTGCAGGTTCCAAACTAG
TCCTTCGGTGTGAAA

### Example 40: PDX Animal Model

[1440] A patient derived xenograft (PDX) animal model containing engrafted aberrant cells comprising a polynucleotide fusion and expressing a polypeptide fusion encoded therefrom is prepared for treatment with Zenocutuzumab as ERB2 and/or Erb3 targeting agent for evaluation of the therapeutic activity thereof.

[1441] PDX models can be generated from samples containing a cancer or tumor, such as in this example of a female patient diagnosed with pancreatic adenocarcinoma and a CDH1-NRG1 polynucleotide fusion (see example 18) essentially as described in Puig et al., A Personalized Preclinical Model to Evaluate the Metastatic Potential of Patient-Derived Colon Cancer Initiating Cells, Clin Cancer Res; 19(24), 6787-6801 (2013), which is incorporated in its entirety into this application.

[1442] For all mouse studies female NOD.CB17/AlhnRj-Prkdescid/Rj mice (Janvier Labs) aged between 6-8 weeks are used.

[1443] The models can be injected subcutaneously, or orthotopically in the pancreas, of immunodeficient mice. Orthotopic models generate local and distant metastases in lymph nodes, liver, lungs or carcinomatoses, reproducing the advance disease in PDAC patients.

[1444] At week 6, all mice treated with vehicle or zenocutuzumab are sacrificed and analysed for efficacy of the treatment.

[1445] A statistically relevant number of NOD-SCID mice can be given orthotopic pancreatic injections of 1*10\hat{ }6 tumor cells derived from said PDX model. From 15 days post-injection, weekly CT imaging is used to monitor mice and detect primary tumors in the pancreas. Treatments are initiated after at least 80% of animals have a primary tumor growing in the pancreas.

[1446] Mice are excluded from the study based on not complying with the following qualitative standards, including dying after surgery, being without primary tumor, mice with too large tumors, insufficient body weight, and general signs of illness. Dosing and treatment regime is according to Example 12, however, using standard procedures and calculations, care is taken to appropriately translate conditions relevant for mice from the human situation.

The application's sequence listing, which the Patent Office published only in electronic form, follows.

SEQUENCE LISTING (942 sequences)

SEQ ID NO: 1 - DNA, 43 bp, Homo sapiens
caggtcctgagcctcgagccgcagcacgagctcaaattccgag

SEQ ID NO: 2 - DNA, 51 bp, Homo sapiens
ccttgcctccccgattgaaagagatgaaaagccaggaatcggctgcaggtt

SEQ ID NO: 3 - DNA, 94 bp, Homo sapiens
caggtcctgagcctcgagccgcagcacgagctcaaattccgagccttgcctccccgattgaaagagatgaaaagccaggaatcggctgcaggtt

SEQ ID NO: 4 - protein, 31 aa, Homo sapiens
QVLSLEPQHELKFRALPPRLKEMKSQESAAG

SEQ ID NO: 5 - DNA, 53 bp, Homo sapiens
agcttcaaacatagtggggaaagctcactcggattatatgctgtatgtatacg

SEQ ID NO: 6 - DNA, 32 bp, Homo sapiens
ctacatctacatccaccactgggacaagccat

SEQ ID NO: 7 - DNA, 85 bp, Homo sapiens
agcttcaaacatagtggggaaagctcactcggattatatgctgtatgtatacgctacatctacatccaccactgggacaagccat

SEQ ID NO: 8 - protein, 28 aa, Homo sapiens
ASNIVGKAHSDYMLYVYATSTSTTGTSH

SEQ ID NO: 9 - DNA, 52 bp, Homo sapiens
gacgaagacagtccctggatcaccgacagcacagacagaatccctgctacca

SEQ ID NO: 10 - DNA, 58 bp, Homo sapiens
ccttgcctccccgattgaaagagatgaaaagccaggaatcggctgcaggttccaaact

SEQ ID NO: 11 - DNA, 110 bp, Homo sapiens
gacgaagacagtccctggatcaccgacagcacagacagaatccctgctaccaccttgcctccccgattgaaagagatgaaaagccaggaatcggctgcaggttccaaact

SEQ ID NO: 12 - protein, 36 aa, Homo sapiens
DEDSPWITDSTDRIPATTLPPRLKEMKSQESAAGSK

SEQ ID NO: 13 - DNA, 53 bp, Homo sapiens
ccgcatcggcgaccttcaggccttccagggccacggcgcgggcaacctggcgg

SEQ ID NO: 14 - DNA, 35 bp, Homo sapiens
catctacatctacatccaccactgggacaagccat

SEQ ID NO: 15 - DNA, 88 bp, Homo sapiens
ccgcatcggcgaccttcaggccttccagggccacggcgcgggcaacctggcggcatctacatctacatccaccactgggacaagccat

SEQ ID NO: 16 - protein, 29 aa, Homo sapiens
RIGDLQAFQGHGAGNLAASTSTSTTGTSH

SEQ ID NO: 17 - DNA, 399 bp, Homo sapiens
agtccccgcccctggagccggcggcgcagggcgcagcttcccgccgccagagcgggccagcctgctgcgtgcgtgcgtgtgtacgactctgcgtgcgtgcgtgcgtgcgtgcgtgccgtcagctcgccgggcaccgcggcctcgccctcgccctccgcccctgcgcctgcaccgcgtagaccgacccccccccagcgcgcccacccggtagaggacccccgcccgtgccccgaccggtccccgcctttttgtaaaacttaaagcgggcgcagcattaacgcttcccgccccggtgacctctcaggggtctccccgccaaaggtgctccgccgctaaggaacatggcgaaggtggagcaggtcctgagcctcgagccgcagcacgagctcaaattccgag

SEQ ID NO: 18 - DNA, 153 bp, Homo sapiens
gtcccttcaccgatgttgtcaccaccaacctaaagcttggcaacccgacagaccgaaatgtgtgttttaaggtgaagactacagcaccacgtaggtactgtgtgaggcccaacagcggaatcatcgatgcaggggcctcaattaatgtatctg

SEQ ID NO: 19 - DNA, 104 bp, Homo sapiens
tgatgttacagcctttcgattatgatcccaatgagaaaagtaaacacaagtttatggttcagtctatgtttgctccaactgacacttcagatatggaagcagta

SEQ ID NO: 20 - DNA, 81 bp, Homo sapiens
tggaaggaggcaaaaccggaagaccttatggattcaaaacttagatgtgtgtttgaattgccagcagagaatgataaacca

SEQ ID NO: 21 - DNA, 177 bp, Homo sapiens
catgatgtagaaataaataaaattatatccacaactgcatcaaagacagaaacaccaatagtgtctaagtctctgagttcttctttggatgacaccgaagttaagaaggttatggaagaatgtaagaggctgcaaggtgaagttcagaggctacgggaggagaacaagcagttcaag

SEQ ID NO: 22 - DNA, 7035 bp, Homo sapiens
gaagaagatggactgcggatgaggaagacagtgcagagcaacagccccatttcagcattagccccaactgggaaggaagaaggccttagcacccggctcttggctctggtggttttgttctttatcgttggtgtaattattgggaagattgccttgtagaggtagcatgcacaggatggtaaattggattggtggatccaccatatcatgggatttaaatttatcataaccatgtgtaaaaagaaattaatgtatgatgacatctcacaggtcttgcctttaaattacccctccctgcacacacatacacagatacacacacacaaatataatgtaacgatcttttagaaagttaaaaatgtatagtaactgattgagggggaaaagaatgatctttattaatgacaagggaaaccatgagtaatgccacaatggcatattgtaaatgtcattttaaacattggtaggccttggtacatgatgctggattacctctcttaaaatgacacccttcctcgcctgttggtgctggcccttggggagctggagcccagcatgctggggagtgcggtcagctccacacagtagtccccacgtggcccactcccggcccaggctgctttccgtgtcttcagttctgtccaagccatcagctccttgggactgatgaacagagtcagaagcccaaaggaattgcactgtggcagcatcagacgtactcgtcataagtgagaggcgtgtgttgactgattgacccagcgctttggaaataaatggcagtgctttgttcacttaaagggaccaagctaaatttgtattggttcatgtagtgaagtcaaactgttattcagagatgtttaatgcatatttaacttatttaatgtatttcatctcatgttttcttattgtcacaagagtacagttaatgctgcgtgctgctgaactctgttgggtgaactggtattgctgctggagggctgtgggctcctctgtctctggagagtctggtcatgtggaggtggggtttattgggatgctggagaagagctgccaggaagtgttttttctgggtcagtaaataacaactgtcatagggagggaaattctcagtagtgacagtcaactctaggttaccttttttaatgaagagtagtcagtcttctagattgttcttataccacctctcaaccattactcacacttccagcgcccaggtccaagtctgagcctgacctccccttggggacctagcctggagtcaggacaaatggatcgggctgcagagggttagaagcgagggcaccagcagttgtgggtggggagcaagggaagagagaaactcttcagcgaatccttctagtactagttgagagtttgactgtgaattaattttatgccataaaagaccaacccagttctgtttgactatgtagcatcttgaaaagaaaaattataataaagccccaaaattaagaattcttttgtcattttgtcacatttgctctatggggggaattattattttatcatttttattattttgccattggaaggttaactttaaaatgagccctatcactgagaaatacgtgtttcatgatttaactctgtgtgtgtgtgtgtgtgtgtgtgtgtgtgtgtgtgtattttttttttggttgtcttcagctgacagtatgaaaaatgaaactgctgaaaaagctgagcacctggtcacccttggccttccattgctttggccttcagtaaaaagcagcctcccttctaggtcagggaaccatgccattgagactagtaacgggcgttctgggcacagtcccactgtgcacaggtttgagaggacaagttcatcagaaggaaggcagtccttagaagtcacatacgttgagccacgttgctcctaagcctggctctgtcaagctgggtcaggggccttgaaactggagaagtggaagtctatggttggtctgagtaagtaacttcctgtcttcatgaaaaaagttgactttgaatcccaggtactcacagaaatggtgaacagacttagttgttacccaggcacccatggattgtgttgagtgtgcagacagggaggccaccccaataggaattcgtctccaggatttttcccatgtgtcccccagtacttataaaagggagtgaaaagaccgagctgtaaggcatgtgccttctgccacctgactttccgtgaggggactaaaatttactaattgtagttgctgcagccagttaagtcctgtagcttccaggccctcatgtctttgataggagagtgcttaggtggtccccaacagtgcctaggggtacagtacagtcccattacactagagcagggctctatttatttttaaaggatatggccgtgtgttttgataaaactttattcacaaaaacagccgggtcatgggatttggcttgtgagtctgtaacagttcttaaaaagaatatctgagaaactactctgttttagacctttgaaggtgatttagagttttgtgtacatctaggagaaggtgttcagcttctcagaggatgtggacattttggttgcagctaaaaatcagtctctgaagtctctctcccttctagaggttaggacttggtgaacatgtttgtgggccttttgactgagtggcagaaggaaactgctcaggaagagaaacaggtgactgatgggaaggttgattattttctcagtcatcctggcagccaaaaatgtgccaggaaaagaaagaatgtggagcacgcgtggctcctggaggacttggagatgcatgcacatttagggtgttttccctagaattacataatgaaaaaaagaataaggcaaagaggaggtgaatatggggcctgtcacaacggcctgccctgccccaagagggttaagagtcagataatcgggacgaaactggcatggaaagagcgagcctagggaggatgccgctgggcagtgtgcatgggggagctgctgccaggctgccctccagtctgctcctgtggttactggctccacagcacctcagagagggcggccctggcttcagaaatgccagccatagtgctcacaaatgcagaagagatggaagcggtgacagaatcctgaaagtttttattgattgaagttttaaattggtaacttaagcttccttggcacgatacaaaatacctcttaaagacagcaggcttttttatttgtaggtgtgaggaactggctttaacttttttctcctcctagtttgcatgttttccttctctcgtcttctgaactgctggcaccagcagtaatacatactgataaaatcaaaattgatttttaccagtggccagtttatggctagagagacgacttatacctccataacacagaagggggaaaaatgaagaacctccagtgatccgtgaaaacctaaacgctttcaaacaaatcccaggaacagaattgctatcgaaagatatcattgcccagtttgcaggctatgttgagtcagatagaactgaatgtagtgagagctcagagctacagagcctttcagatgaatttgaaaacagactctgtgtgtgtgtgcatgtgtgcatgtgtgcatgtgtggcatatgtgccgtatgtcagtagcttgacagttttcaaatcgtgcctatatttttttgcatacacaaatttttgtgtttgcaaactcagaatccatgccaaaatacaatgttatatgtcattttcagctccttctctaaaggaatggcccatttctcattgtagtttgagaaatacatgtatgaagagataggggtcttgggcttcccagtgtcactttgaacacctgaataacatttaactcctgagaccttctcggtgtagaggccactgcttccccctgctggagatggcatttcattgaagggcctctcgtggctttccctgcccccggctgtctggcctgaagaaggagaaagaaccaaactgaactatgaaaagttaccactctgaggagacctctcttaattaacacttggggccatgtttgctgttgttgagaaggagtgttctcaaagatgagctggaatggaattgtatttagaaaggcccctgcaaagtatatagatggatgactctagttcatgacatacaaatcccataaggccaacgaccactcttctggaacaccaagagcagctctgagatcatgctggccctacgcgaattgagtttctgtggcctaattggatttggagaacgccttccctggccccttttcctcagacagatctgctctgataggaaccttttcaagaaagttactgttgtttcaatgccactccttacctgtatagaacatttccaatacattcgctcattgaacttaatccttgcaactgtgactggggggtagatggctctgtttgcatacgaagaaataaaggctccaggaggttaaatcgggcaactttttagaactaaatcagtctctgtaaggcctacattgctaagataccatttcagctctgaaaatctgcttcagggaagtgagtggatgaggccttcctgcctcagctactctgcccgtctgtacatcttttgtgtctgcctccgtaccttattcagttattttcacactaaagtaagtagaattaagactgtagttcagatgctttttctttttctgttggaaactgaacacactacagacagtgaaaaaaggtacatattccattttctcattgcctgaagatctctgctgatgctcctggagaatgactttgggggctttagaaagaatattgccagtccgtctcggcaaggagatgatgggagcgctttatatggaggctttacatgacttgtaaattaaatgtgaatgagggcagttgattaaaattggtattacagaagggccctgctgaggtttgaaaacagctgagctgctgatgtctcaggcctttccctgaattagcactgcggttctccaggatatcagcaaagagggcaagtaatagaagcccctgataaggagcgtcagccgacaggcaagcttgggaggctgtgggaatgggtctgcccccagcttcacagacctcttcctccagcctctgaatcccattagccacagcctagaacattagctgagctgcacaagctcacccacccctgtgccagggggccctgacctccctccatgccatgtttttggctgtatctacggcacttaacaataggggctttttattttcattacagagatattttgaaaaatttaaaagacatgaactcacataaacagttatggatgatagttaaaagagaaacgggtggaggtggatgagaggttgtcttcatgaatataattacttgagatttttttttcttaatggaattagtttattagaaaatgtctgtgttaaatccgtagaaaaggaagaaaagtgtagcaacaaaaatgtagccattatctaacttgccataaatatttgcagttatgataccttggaatgttgccacgatatggattgctttgattaaaagatgtcagttgaataaaacagtactgtgggagaatcgctttctgctgctagataaatgctgatgtttatttttaaaccaggaaacattgatcctgtaacaatgcccgattacaattgctttattacaccccagggctgatggagatgtaatcacttggctaatggatgtgggtgcaggacagatgctcgcttgctggcctgctttcctgcttgcattctgatgagctgcaggagtgcgcctggccttctgcaggtggagctgctgtcagagcttcgtttcactgatacccaaagccatgtctgactgaaataaaacaggttccctttttttttccctttggaaaatgccaactaagggagactaatcagatatcttaacacaatttcatccaggcttagtgctaacaagattgcggggctttttagggtttaagaagatgagaaatgagtgtgcacgtttcacacgttgacttgccggtttttccatgtcatacaaaaaagtcctggctgtttctccgaactggctgcctgcattcccgtctttcttttgtttttaagaaatagactgaattcagctgttaatcctctagtacagtatccatgttaaaatgtttttccattgcatcttttatgtgaattcaaaggtcagaatttattgtctgtgatattgagaccatgtgtacaagaactactttttgcttttcatcattcactccttagcaaacgtttcgtaagtaccctctgtctgtttgctactatatgaggtgctgcgaaattagtgggcgtggctttttatatttttcattcgtgtgtagcctaagtaaggtgactcaagatgatacaccgagagaaaaatgcaaaatatatttggttctcatttctgttgctgtcgtttcctttttaaagacgatttatcaactgctgccatttggaacttcctataagaaactaaaaatgatctatttcagtgttcctttcgcctttcctctgctttctgaataaatggtttcagtaacccatgctgttctctccctattctacgtctttctccctatgttgaaaaaagattcccacagtttctgatgtgtgtgtttatagtcttcaatgtatgttaacatgttaggaactgagtatcttaagagatgtcttagaatgctttagttttcataatttgtcctttatgtatttttcattgtatttgctgttttgacatggaagtaatttaaaaagttggtgcaggaaaggactctttactgttgcacattttggttttctgatatgtaataaattcatggcttggcagctgacatgatgtttcccagagagaaggagatgtatttctgcagggtccagaccaaaagagccatttacagcatgttctcccatgttccattatcagcctgatgaaacctgccctgccaaggcataaacttttgtactagctgtctccatattatgttcaataaattctgtgctctgaatatatttaaaaaaaaaaaaa

SEQ ID NO: 23 - DNA, 7949 bp, Homo sapiens
agtccccgcccctggagccggcggcgcagggcgcagcttcccgccgccagagcgggccagcctgctgcgtgcgtgcgtgtgtacgactctgcgtgcgtgcgtgcgtgcgtgcgtgccgtcagctcgccgggcaccgcggcctcgccctcgccctccgcccctgcgcctgcaccgcgtagaccgacccccccccagcgcgcccacccggtagaggacccccgcccgtgccccgaccggtccccgcctttttgtaaaacttaaagcgggcgcagcattaacgcttcccgccccggtgacctctcaggggtctccccgccaaaggtgctccgccgctaaggaacatggcgaaggtggagcaggtcctgagcctcgagccgcagcacgagctcaaattccgaggtcccttcaccgatgttgtcaccaccaacctaaagcttggcaacccgacagaccgaaatgtgtgttttaaggtgaagactacagcaccacgtaggtactgtgtgaggcccaacagcggaatcatcgatgcaggggcctcaattaatgtatctgtgatgttacagcctttcgattatgatcccaatgagaaaagtaaacacaagtttatggttcagtctatgtttgctccaactgacacttcagatatggaagcagtatggaaggaggcaaaaccggaagaccttatggattcaaaacttagatgtgtgtttgaattgccagcagagaatgataaaccacatgatgtagaaataaataaaattatatccacaactgcatcaaagacagaaacaccaatagtgtctaagtctctgagttcttctttggatgacaccgaagttaagaaggttatggaagaatgtaagaggctgcaaggtgaagttcagaggctacgggaggagaacaagcagttcaaggaagaagatggactgcggatgaggaagacagtgcagagcaacagccccatttcagcattagccccaactgggaaggaagaaggccttagcacccggctcttggctctggtggttttgttctttatcgttggtgtaattattgggaagattgccttgtagaggtagcatgcacaggatggtaaattggattggtggatccaccatatcatgggatttaaatttatcataaccatgtgtaaaaagaaattaatgtatgatgacatctcacaggtcttgcctttaaattacccctccctgcacacacatacacagatacacacacacaaatataatgtaacgatcttttagaaagttaaaaatgtatagtaactgattgagggggaaaagaatgatctttattaatgacaagggaaaccatgagtaatgccacaatggcatattgtaaatgtcattttaaacattggtaggccttggtacatgatgctggattacctctcttaaaatgacacccttcctcgcctgttggtgctggcccttggggagctggagcccagcatgctggggagtgcggtcagctccacacagtagtccccacgtggcccactcccggcccaggctgctttccgtgtcttcagttctgtccaagccatcagctccttgggactgatgaacagagtcagaagcccaaaggaattgcactgtggcagcatcagacgtactcgtcataagtgagaggcgtgtgttgactgattgacccagcgctttggaaataaatggcagtgctttgttcacttaaagggaccaagctaaatttgtattggttcatgtagtgaagtcaaactgttattcagagatgtttaatgcatatttaacttatttaatgtatttcatctcatgttttcttattgtcacaagagtacagttaatgctgcgtgctgctgaactctgttgggtgaactggtattgctgctggagggctgtgggctcctctgtctctggagagtctggtcatgtggaggtggggtttattgggatgctggagaagagctgccaggaagtgttttttctgggtcagtaaataacaactgtcatagggagggaaattctcagtagtgacagtcaactctaggttaccttttttaatgaagagtagtcagtcttctagattgttcttataccacctctcaaccattactcacacttccagcgcccaggtccaagtctgagcctgacctccccttggggacctagcctggagtcaggacaaatggatcgggctgcagagggttagaagcgagggcaccagcagttgtgggtggggagcaagggaagagagaaactcttcagcgaatccttctagtactagttgagagtttgactgtgaattaattttatgccataaaagaccaacccagttctgtttgactatgtagcatcttgaaaagaaaaattataataaagccccaaaattaagaattcttttgtcattttgtcacatttgctctatggggggaattattattttatcatttttattattttgccattggaaggttaactttaaaatgagccctatcactgagaaatacgtgtttcatgatttaactctgtgtgtgtgtgtgtgtgtgtgtgtgtgtgtgtgtgtattttttttttggttgtcttcagctgacagtatgaaaaatgaaactgctgaaaaagctgagcacctggtcacccttggccttccattgctttggccttcagtaaaaagcagcctcccttctaggtcagggaaccatgccattgagactagtaacgggcgttctgggcacagtcccactgtgcacaggtttgagaggacaagttcatcagaaggaaggcagtccttagaagtcacatacgttgagccacgttgctcctaagcctggctctgtcaagctgggtcaggggccttgaaactggagaagtggaagtctatggttggtctgagtaagtaacttcctgtcttcatgaaaaaagttgactttgaatcccaggtactcacagaaatggtgaacagacttagttgttacccaggcacccatggattgtgttgagtgtgcagacagggaggccaccccaataggaattcgtctccaggatttttcccatgtgtcccccagtacttataaaagggagtgaaaagaccgagctgtaaggcatgtgccttctgccacctgactttccgtgaggggactaaaatttactaattgtagttgctgcagccagttaagtcctgtagcttccaggccctcatgtctttgataggagagtgcttaggtggtccccaacagtgcctaggggtacagtacagtcccattacactagagcagggctctatttatttttaaaggatatggccgtgtgttttgataaaactttattcacaaaaacagccgggtcatgggatttggcttgtgagtctgtaacagttcttaaaaagaatatctgagaaactactctgttttagacctttgaaggtgatttagagttttgtgtacatctaggagaaggtgttcagcttctcagaggatgtggacattttggttgcagctaaaaatcagtctctgaagtctctctcccttctagaggttaggacttggtgaacatgtttgtgggccttttgactgagtggcagaaggaaactgctcaggaagagaaacaggtgactgatgggaaggttgattattttctcagtcatcctggcagccaaaaatgtgccaggaaaagaaagaatgtggagcacgcgtggctcctggaggacttggagatgcatgcacatttagggtgttttccctagaattacataatgaaaaaaagaataaggcaaagaggaggtgaatatggggcctgtcacaacggcctgccctgccccaagagggttaagagtcagataatcgggacgaaactggcatggaaagagcgagcctagggaggatgccgctgggcagtgtgcatgggggagctgctgccaggctgccctccagtctgctcctgtggttactggctccacagcacctcagagagggcggccctggcttcagaaatgccagccatagtgctcacaaatgcagaagagatggaagcggtgacagaatcctgaaagtttttattgattgaagttttaaattggtaacttaagcttccttggcacgatacaaaatacctcttaaagacagcaggcttttttatttgtaggtgtgaggaactggctttaacttttttctcctcctagtttgcatgttttccttctctcgtcttctgaactgctggcaccagcagtaatacatactgataaaatcaaaattgatttttaccagtggccagtttatggctagagagacgacttatacctccataacacagaagggggaaaaatgaagaacctccagtgatccgtgaaaacctaaacgctttcaaacaaatcccaggaacagaattgctatcgaaagatatcattgcccagtttgcaggctatgttgagtcagatagaactgaatgtagtgagagctcagagctacagagcctttcagatgaatttgaaaacagactctgtgtgtgtgtgcatgtgtgcatgtgtgcatgtgtggcatatgtgccgtatgtcagtagcttgacagttttcaaatcgtgcctatatttttttgcatacacaaatttttgtgtttgcaaactcagaatccatgccaaaatacaatgttatatgtcattttcagctccttctctaaaggaatggcccatttctcattgtagtttgagaaatacatgtatgaagagataggggtcttgggcttcccagtgtcactttgaacacctgaataacatttaactcctgagaccttctcggtgtagaggccactgcttccccctgctggagatggcatttcattgaagggcctctcgtggctttccctgcccccggctgtctggcctgaagaaggagaaagaaccaaactgaactatgaaaagttaccactctgaggagacctctcttaattaacacttggggccatgtttgctgttgttgagaaggagtgttctcaaagatgagctggaatggaattgtatttagaaaggcccctgcaaagtatatagatggatgactctagttcatgacatacaaatcccataaggccaacgaccactcttctggaacaccaagagcagctctgagatcatgctggccctacgcgaattgagtttctgtggcctaattggatttggagaacgccttccctggccccttttcctcagacagatctgctctgataggaaccttttcaagaaagttactgttgtttcaatgccactccttacctgtatagaacatttccaatacattcgctcattgaacttaatccttgcaactgtgactggggggtagatggctctgtttgcatacgaagaaataaaggctccaggaggttaaatcgggcaactttttagaactaaatcagtctctgtaaggcctacattgctaagataccatttcagctctgaaaatctgcttcagggaagtgagtggatgaggccttcctgcctcagctactctgcccgtctgtacatcttttgtgtctgcctccgtaccttattcagttattttcacactaaagtaagtagaattaagactgtagttcagatgctttttctttttctgttggaaactgaacacactacagacagtgaaaaaaggtacatattccattttctcattgcctgaagatctctgctgatgctcctggagaatgactttgggggctttagaaagaatattgccagtccgtctcggcaaggagatgatgggagcgctttatatggaggctttacatgacttgtaaattaaatgtgaatgagggcagttgattaaaattggtattacagaagggccctgctgaggtttgaaaacagctgagctgctgatgtctcaggcctttccctgaattagcactgcggttctccaggatatcagcaaagagggcaagtaatagaagcccctgataaggagcgtcagccgacaggcaagcttgggaggctgtgggaatgggtctgcccccagcttcacagacctcttcctccagcctctgaatcccattagccacagcctagaacattagctgagctgcacaagctcacccacccctgtgccagggggccctgacctccctccatgccatgtttttggctgtatctacggcacttaacaataggggctttttattttcattacagagatattttgaaaaatttaaaagacatgaactcacataaacagttatggatgatagttaaaagagaaacgggtggaggtggatgagaggttgtcttcatgaatataattacttgagatttttttttcttaatggaattagtttattagaaaatgtctgtgttaaatccgtagaaaaggaagaaaagtgtagcaacaaaaatgtagccattatctaacttgccataaatatttgcagttatgataccttggaatgttgccacgatatggattgctttgattaaaagatgtcagttgaataaaacagtactgtgggagaatcgctttctgctgctagataaatgctgatgtttatttttaaaccaggaaacattgatcctgtaacaatgcccgattacaattgctttattacaccccagggctgatggagatgtaatcacttggctaatggatgtgggtgcaggacagatgctcgcttgctggcctgctttcctgcttgcattctgatgagctgcaggagtgcgcctggccttctgcaggtggagctgctgtcagagcttcgtttcactgatacccaaagccatgtctgactgaaataaaacaggttccctttttttttccctttggaaaatgccaactaagggagactaatcagatatcttaacacaatttcatccaggcttagtgctaacaagattgcggggctttttagggtttaagaagatgagaaatgagtgtgcacgtttcacacgttgacttgccggtttttccatgtcatacaaaaaagtcctggctgtttctccgaactggctgcctgcattcccgtctttcttttgtttttaagaaatagactgaattcagctgttaatcctctagtacagtatccatgttaaaatgtttttccattgcatcttttatgtgaattcaaaggtcagaatttattgtctgtgatattgagaccatgtgtacaagaactactttttgcttttcatcattcactccttagcaaacgtttcgtaagtaccctctgtctgtttgctactatatgaggtgctgcgaaattagtgggcgtggctttttatatttttcattcgtgtgtagcctaagtaaggtgactcaagatgatacaccgagagaaaaatgcaaaatatatttggttctcatttctgttgctgtcgtttcctttttaaagacgatttatcaactgctgccatttggaacttcctataagaaactaaaaatgatctatttcagtgttcctttcgcctttcctctgctttctgaataaatggtttcagtaacccatgctgttctctccctattctacgtctttctccctatgttgaaaaaagattcccacagtttctgatgtgtgtgtttatagtcttcaatgtatgttaacatgttaggaactgagtatcttaagagatgtcttagaatgctttagttttcataatttgtcctttatgtatttttcattgtatttgctgttttgacatggaagtaatttaaaaagttggtgcaggaaaggactctttactgttgcacattttggttttctgatatgtaataaattcatggcttggcagctgacatgatgtttcccagagagaaggagatgtatttctgcagggtccagaccaaaagagccatttacagcatgttctcccatgttccattatcagcctgatgaaacctgccctgccaaggcataaacttttgtactagctgtctccatattatgttcaataaattctgtgctctgaatatatttaaaaaaaaaaaaa

SEQ ID NO: 24 - protein, 19 aa, Homo sapiens
MAKVEQVLSLEPQHELKFR

SEQ ID NO: 25 - protein, 50 aa, Homo sapiens
PFTDVVTTNLKLGNPTDRNVCFKVKTTAPRRYCVRPNSGIIDAGASINVS

SEQ ID NO: 26 - protein, 34 aa, Homo sapiens
MLQPFDYDPNEKSKHKFMVQSMFAPTDTSDMEAV

SEQ ID NO: 27 - protein, 27 aa, Homo sapiens
WKEAKPEDLMDSKLRCVFELPAENDKP

SEQ ID NO: 28 - protein, 59 aa, Homo sapiens
HDVEINKIISTTASKTETPIVSKSLSSSLDDTEVKKVMEECKRLQGEVQRLREENKQFK

SEQ ID NO: 29 - protein, 52 aa, Homo sapiens
EEDGLRMRKTVQSNSPISALAPTGKEEGLSTRLLALVVLFFIVGVIIGKIAL

SEQ ID NO: 30 - protein, 243 aa, Homo sapiens
MAKVEQVLSLEPQHELKFRGPFTDVVTTNLKLGNPTDRNVCFKVKTTAPRRYCVRPNSGIIDAGASINVSVMLQPFDYDPNEKSKHKFMVQSMFAPTDTSDMEAVWKEAKPEDLMDSKLRCVFELPAENDKPHDVEINKIISTTASKTETPIVSKSLSSSLDDTEVKKVMEECKRLQGEVQRLREENKQFKEEDGLRMRKTVQSNSPISALAPTGKEEGLSTRLLALVVLFFIVGVIIGKIAL

SEQ ID NO: 31-32 - skipped (2 entries)

SEQ ID NO: 33 - DNA, 253 bp, Homo sapiens
ggttgggctcgcggcgctgtgattggtctgcccggactccgcctccagcgcatgtcattagcatctcattagctgtccgctcgggctccggaggcagccaacgccgccagtctgaggcaggtgcccgacatggcgagtgtagtgctgccgagcggatcccagtgtgcggcggcagcggcggcggcggcgcctcccgggctccggctccggcttctgctgttgctcttctccgccgcggcactgatccccacag

SEQ ID NO: 34 - DNA, 147 bp, Homo sapiens
gtgatgggcagaatctgtttacgaaagacgtgacagtgatcgagggagaggttgcgaccatcagttgccaagtcaataagagtgacgactctgtgattcagctactgaatcccaacaggcagaccatttatttcagggacttcaggc

SEQ ID NO: 35 - DNA, 153 bp, Homo sapiens
ctttgaaggacagcaggtttcagttgctgaatttttctagcagtgaactcaaagtatcattgacaaacgtctcaatttctgatgaaggaagatacttttgccagctctataccgatcccccacaggaaagttacaccaccatcacagtcctgg

SEQ ID NO: 36 - DNA, 138 bp, Homo sapiens
tcccaccacgtaatctgatgatcgatatccagaaagacactgcggtggaaggtgaggagattgaagtcaactgcactgctatggccagcaagccagccacgactatcaggtggttcaaagggaacacagagctaaaag

SEQ ID NO: 37 - DNA, 159 bp, Homo sapiens
gcaaatcggaggtggaagagtggtcagacatgtacactgtgaccagtcagctgatgctgaaggtgcacaaggaggacgatggggtcccagtgatctgccaggtggagcaccctgcggtcactggaaacctgcagacccagcggtatctagaagtacagt

SEQ ID NO: 38 - DNA, 100 bp, Homo sapiens
ataagcctcaagtgcacattcagatgacttatcctctacaaggcttaacccgggaaggggacgcgcttgagttaacatgtgaagccatcgggaagcccca

SEQ ID NO: 39 - DNA, 173 bp, Homo sapiens
gcctgtgatggtaacttgggtgagagtcgatgatgaaatgcctcaacacgccgtactgtctgggcccaacctgttcatcaataacctaaacaaaacagataatggtacataccgctgtgaagcttcaaacatagtggggaaagctcactcggattatatgctgtatgtatacg

SEQ ID NO: 40 - DNA, 33 bp, Homo sapiens
acacaacggcgacgacagaaccagcagttcacg

SEQ ID NO: 41 - DNA, 54 bp, Homo sapiens
gccttactcagttgcccaattccgcagaagaactggacagtgaggacctctcag

SEQ ID NO: 42 - DNA, 132 bp, Homo sapiens
attcccgagcaggtgaagaaggctcgatcagggcagtggatcatgccgtgatcggtggcgtcgtggcggtggtggtgttcgccatgctgtgcttgctcatcattctggggcgctattttgccagacataaag

SEQ ID NO: 43 - DNA, 2968 bp, Homo sapiens
gtacatacttcactcatgaagccaaaggagccgatgacgcagcagacgcagacacagctataatcaatgcagaaggaggacagaacaactccgaagaaaagaaagagtacttcatctagatcagcctttttgtttcaatgaggtgtccaactggccctatttagatgataaagagacagtgatattggaacttgcgagaaattcgtgtgtttttttatgaatgggtggaaaggtgtgagactgggaaggcttgggatttgctgtgtaaaaaaaaaaaaaatgttctttggaaagtacactctgctgtttgacacctcttttttcgtttgtttgtttgtttaatttttatttcttcctaccaagtcaaacttggatacttggatttagtttcagtagattgcagaaaattctgtgccttgttttttgtttgtttgttgcgttcctttcttttccccctttgtgcacatttatttcctccctctaccccaatttcggattttttccaaaatctcccattttggaatttgcctgctgggattccttagactcttttccttcccttttctgttctagttttttacttttgtttatttttatggtaactgctttctgttccaaattcagtttcataaaaggagaaccagcacagcttagatttcatagttcagaatttagtgtatccataatgcattcttctctgttgtcgtaaagatttgggtgaacaaacaatgaaaactctttgctgctgcccatgtttcaaatacttagagcagtgaagactagaaaattagactgtgattcagaaaatgttctgtttgctgtggaactacattactgtacagggttatctgcaagtgaggtgtgtcacaatgagattgaatttcactgtctttaattctgtatctgtagacggctcagtatagataccctacgctgtccagaaaggtttggggcagaaaggactcctcctttttccatgccctaaacagacctgacaggtgaggtctgttccttttatataagtggacaaattttgagttgccacaggaggggaagtagggaggggggaaatacagttctgctctggttgtttctgttccaaatgattccatccacctttcccaatcggccttacttctcactaatttgtaggaaaaagcaagttcgtctgttgtgcgaatgactgaatgggacagagttgatttttttttttttttcctttgtgcttagttaggaaggcagtaggatgtggcctgcatgtactgtatattacagatatttgtcatgctgggatttccaactcgaatctgtgtgaaactttcattccttcagatttggcttgacaaaggcaggaggtacaaaagaagggctggtattgttctcacactggtctgctgtcgctctcagttctcgataggtcagagcagaggtggaaaaacagcatgtacggattttcagttacttaatcaaaactcaaatgtgagtgtttttatctttttacctttcatacactagccttggcctctttcctcagccttaagaaccatctgccaaaaattactgatcctcgcatgatggcagccatagtgcatagctactaaaatcagtgaccttgaacatatcttagatggggagcctcgggaaaaggtagaggagtcacgttaccatttacatgttttaaagaaagaagtgtggggattttcactgaaacgtctaggaaatctagaagtagtcctgaaggacagaaactaaactcttaccatatgtttggtaagactccagactccagctaacagtccctatggaaagatggcatcaaaaaagatagatctatatatatatataaatatatattctattacattttcagtgagtaattttggattttgcaaggtgcatttttactattgttacattatgtggaaaacttatgctgatttatttaagggggaaaaagtgtcaactctttgttatttgaaaacatgtttatttttcttgtctttattttaacctttgatagaaccattgcaatatgggggccttttgggaacggactggtatgtaaaagaaaatccattatcgagcagcattttatttacccctcccctatccctaggcacttaaccaagacaaaaagccacaatgaacatccctttttcaatgaattttataatctgcagctctattccgagcccttagcacccattccgaccatagtataatcatatcaaagggtgagaatcatttagcatgttgttgaaaggttttttttcagttgttctttttagaaaaaaagaaaaacaaaaacaaaaacaaaaaaaaaaaatcacaccattgctcacagaattggcatctcatttttgggacctcccatctttctgttttgaaaagtgtacagtagtgcagtgttcctgatgtaactttatggcttacaatgttgacatgtctcaggttcatgtgttgcgattggtgttttccgtctcaggtagattgcaaagtgtaggccccacacattggaaaaaataataataaaacaaagcaaaaacaggaaattatggattttagttgtatattggtttatgtattttttcttaagtatacagtgcactgtttgaaatgtattgttgagtattactttgtacaggttgatcactttttttagagtgaagaaagaacaaacttgttttttgtgttttttaaaggaatataaaataatgaaggatgtataattgatgccaaataagcttgttctttagtcacaccgacgtcttatttttccctttaggccagttctgtttttaaggtgtacatggacaatgttacagtgtaagaaactccatatccatatgttcccattcgcattttgtattggttcatgtataccatttttacaaaaaaaaaaagaaaaaaaagaagtactataaaatatctgtcttcttaataaaaaaaaattaatgttacaaagtga

SEQ ID NO: 44 - DNA, 4310 bp, Homo sapiens
ggttgggctcgcggcgctgtgattggtctgcccggactccgcctccagcgcatgtcattagcatctcattagctgtccgctcgggctccggaggcagccaacgccgccagtctgaggcaggtgcccgacatggcgagtgtagtgctgccgagcggatcccagtgtgcggcggcagcggcggcggcggcgcctcccgggctccggctccggcttctgctgttgctcttctccgccgcggcactgatccccacaggtgatgggcagaatctgtttacgaaagacgtgacagtgatcgagggagaggttgcgaccatcagttgccaagtcaataagagtgacgactctgtgattcagctactgaatcccaacaggcagaccatttatttcagggacttcaggcctttgaaggacagcaggtttcagttgctgaatttttctagcagtgaactcaaagtatcattgacaaacgtctcaatttctgatgaaggaagatacttttgccagctctataccgatcccccacaggaaagttacaccaccatcacagtcctggtcccaccacgtaatctgatgatcgatatccagaaagacactgcggtggaaggtgaggagattgaagtcaactgcactgctatggccagcaagccagccacgactatcaggtggttcaaagggaacacagagctaaaaggcaaatcggaggtggaagagtggtcagacatgtacactgtgaccagtcagctgatgctgaaggtgcacaaggaggacgatggggtcccagtgatctgccaggtggagcaccctgcggtcactggaaacctgcagacccagcggtatctagaagtacagtataagcctcaagtgcacattcagatgacttatcctctacaaggcttaacccgggaaggggacgcgcttgagttaacatgtgaagccatcgggaagccccagcctgtgatggtaacttgggtgagagtcgatgatgaaatgcctcaacacgccgtactgtctgggcccaacctgttcatcaataacctaaacaaaacagataatggtacataccgctgtgaagcttcaaacatagtggggaaagctcactcggattatatgctgtatgtatacgacacaacggcgacgacagaaccagcagttcacggccttactcagttgcccaattccgcagaagaactggacagtgaggacctctcagattcccgagcaggtgaagaaggctcgatcagggcagtggatcatgccgtgatcggtggcgtcgtggcggtggtggtgttcgccatgctgtgcttgctcatcattctggggcgctattttgccagacataaaggtacatacttcactcatgaagccaaaggagccgatgacgcagcagacgcagacacagctataatcaatgcagaaggaggacagaacaactccgaagaaaagaaagagtacttcatctagatcagcctttttgtttcaatgaggtgtccaactggccctatttagatgataaagagacagtgatattggaacttgcgagaaattcgtgtgtttttttatgaatgggtggaaaggtgtgagactgggaaggcttgggatttgctgtgtaaaaaaaaaaaaaatgttctttggaaagtacactctgctgtttgacacctcttttttcgtttgtttgtttgtttaatttttatttcttcctaccaagtcaaacttggatacttggatttagtttcagtagattgcagaaaattctgtgccttgttttttgtttgtttgttgcgttcctttcttttccccctttgtgcacatttatttcctccctctaccccaatttcggattttttccaaaatctcccattttggaatttgcctgctgggattccttagactcttttccttcccttttctgttctagttttttacttttgtttatttttatggtaactgctttctgttccaaattcagtttcataaaaggagaaccagcacagcttagatttcatagttcagaatttagtgtatccataatgcattcttctctgttgtcgtaaagatttgggtgaacaaacaatgaaaactctttgctgctgcccatgtttcaaatacttagagcagtgaagactagaaaattagactgtgattcagaaaatgttctgtttgctgtggaactacattactgtacagggttatctgcaagtgaggtgtgtcacaatgagattgaatttcactgtctttaattctgtatctgtagacggctcagtatagataccctacgctgtccagaaaggtttggggcagaaaggactcctcctttttccatgccctaaacagacctgacaggtgaggtctgttccttttatataagtggacaaattttgagttgccacaggaggggaagtagggaggggggaaatacagttctgctctggttgtttctgttccaaatgattccatccacctttcccaatcggccttacttctcactaatttgtaggaaaaagcaagttcgtctgttgtgcgaatgactgaatgggacagagttgatttttttttttttttcctttgtgcttagttaggaaggcagtaggatgtggcctgcatgtactgtatattacagatatttgtcatgctgggatttccaactcgaatctgtgtgaaactttcattccttcagatttggcttgacaaaggcaggaggtacaaaagaagggctggtattgttctcacactggtctgctgtcgctctcagttctcgataggtcagagcagaggtggaaaaacagcatgtacggattttcagttacttaatcaaaactcaaatgtgagtgtttttatctttttacctttcatacactagccttggcctctttcctcagccttaagaaccatctgccaaaaattactgatcctcgcatgatggcagccatagtgcatagctactaaaatcagtgaccttgaacatatcttagatggggagcctcgggaaaaggtagaggagtcacgttaccatttacatgttttaaagaaagaagtgtggggattttcactgaaacgtctaggaaatctagaagtagtcctgaaggacagaaactaaactcttaccatatgtttggtaagactccagactccagctaacagtccctatggaaagatggcatcaaaaaagatagatctatatatatatataaatatatattctattacattttcagtgagtaattttggattttgcaaggtgcatttttactattgttacattatgtggaaaacttatgctgatttatttaagggggaaaaagtgtcaactctttgttatttgaaaacatgtttatttttcttgtctttattttaacctttgatagaaccattgcaatatgggggccttttgggaacggactggtatgtaaaagaaaatccattatcgagcagcattttatttacccctcccctatccctaggcacttaaccaagacaaaaagccacaatgaacatccctttttcaatgaattttataatctgcagctctattccgagcccttagcacccattccgaccatagtataatcatatcaaagggtgagaatcatttagcatgttgttgaaaggttttttttcagttgttctttttagaaaaaaagaaaaacaaaaacaaaaacaaaaaaaaaaaatcacaccattgctcacagaattggcatctcatttttgggacctcccatctttctgttttgaaaagtgtacagtagtgcagtgttcctgatgtaactttatggcttacaatgttgacatgtctcaggttcatgtgttgcgattggtgttttccgtctcaggtagattgcaaagtgtaggccccacacattggaaaaaataataataaaacaaagcaaaaacaggaaattatggattttagttgtatattggtttatgtattttttcttaagtatacagtgcactgtttgaaatgtattgttgagtattactttgtacaggttgatcactttttttagagtgaagaaagaacaaacttgttttttgtgttttttaaaggaatataaaataatgaaggatgtataattgatgccaaataagcttgttctttagtcacaccgacgtcttatttttccctttaggccagttctgtttttaaggtgtacatggacaatgttacagtgtaagaaactccatatccatatgttcccattcgcattttgtattggttcatgtataccatttttacaaaaaaaaaaagaaaaaaaagaagtactataaaatatctgtcttcttaataaaaaaaaattaatgttacaaagtga

SEQ ID NO: 45 - protein, 41 aa, Homo sapiens
MASVVLPSGSQCAAAAAAAAPPGLRLRLLLLLFSAAALIPT

SEQ ID NO: 46 - protein, 48 aa, Homo sapiens
DGQNLFTKDVTVIEGEVATISCQVNKSDDSVIQLLNPNRQTIYFRDFR

SEQ ID NO: 47 - protein, 50 aa, Homo sapiens
LKDSRFQLLNFSSSELKVSLTNVSISDEGRYFCQLYTDPPQESYTTITVL

SEQ ID NO: 48 - protein, 45 aa, Homo sapiens
PPRNLMIDIQKDTAVEGEEIEVNCTAMASKPATTIRWFKGNTELK

SEQ ID NO: 49 - protein, 52 aa, Homo sapiens
KSEVEEWSDMYTVTSQLMLKVHKEDDGVPVICQVEHPAVTGNLQTQRYLEVQ

SEQ ID NO: 50 - protein, 32 aa, Homo sapiens
KPQVHIQMTYPLQGLTREGDALELTCEAIGKP

SEQ ID NO: 51 - protein, 57 aa, Homo sapiens
PVMVTWVRVDDEMPQHAVLSGPNLFINNLNKTDNGTYRCEASNIVGKAHSDYMLYVY

SEQ ID NO: 52 - protein, 10 aa, Homo sapiens
TTATTEPAVH

SEQ ID NO: 53 - protein, 17 aa, Homo sapiens
LTQLPNSAEELDSEDLS

SEQ ID NO: 54 - protein, 43 aa, Homo sapiens
SRAGEEGSIRAVDHAVIGGVVAVVVFAMLCLLIILGRYFARHK

SEQ ID NO: 55 - protein, 38 aa, Homo sapiens
TYFTHEAKGADDAADADTAIINAEGGQNNSEEKKEYFI

SEQ ID NO: 56 - protein, 443 aa, Homo sapiens
MASVVLPSGSQCAAAAAAAAPPGLRLRLLLLLFSAAALIPTGDGQNLFTKDVTVIEGEVATISCQVNKSDDSVIQLLNPNRQTIYFRDFRPLKDSRFQLLNFSSSELKVSLTNVSISDEGRYFCQLYTDPPQESYTTITVLVPPRNLMIDIQKDTAVEGEEIEVNCTAMASKPATTIRWFKGNTELKGKSEVEEWSDMYTVTSQLMLKVHKEDDGVPVICQVEHPAVTGNLQTQRYLEVQYKPQVHIQMTYPLQGLTREGDALELTCEAIGKPQPVMVTWVRVDDEMPQHAVLSGPNLFINNLNKTDNGTYRCEASNIVGKAHSDYMLYVYDTTATTEPAVHGLTQLPNSAEELDSEDLSDSRAGEEGSIRAVDHAVIGGVVAVVVFAMLCLLIILGRYFARHKGTYFTHEAKGADDAADADTAIINAEGGQNNSEEKKEYFI

SEQ ID NO: 57 - DNA, 1123 bp, Homo sapiens
ggttgggctcgcggcgctgtgattggtctgcccggactccgcctccagcgcatgtcattagcatctcattagctgtccgctcgggctccggaggcagccaacgccgccagtctgaggcaggtgcccgacatggcgagtgtagtgctgccgagcggatcccagtgtgcggcggcagcggcggcggcggcgcctcccgggctccggctccggcttctgctgttgctcttctccgccgcggcactgatccccacaggtgatgggcagaatctgtttacgaaagacgtgacagtgatcgagggagaggttgcgaccatcagttgccaagtcaataagagtgacgactctgtgattcagctactgaatcccaacaggcagaccatttatttcagggacttcaggcctttgaaggacagcaggtttcagttgctgaatttttctagcagtgaactcaaagtatcattgacaaacgtctcaatttctgatgaaggaagatacttttgccagctctataccgatcccccacaggaaagttacaccaccatcacagtcctggtcccaccacgtaatctgatgatcgatatccagaaagacactgcggtggaaggtgaggagattgaagtcaactgcactgctatggccagcaagccagccacgactatcaggtggttcaaagggaacacagagctaaaaggcaaatcggaggtggaagagtggtcagacatgtacactgtgaccagtcagctgatgctgaaggtgcacaaggaggacgatggggtcccagtgatctgccaggtggagcaccctgcggtcactggaaacctgcagacccagcggtatctagaagtacagtataagcctcaagtgcacattcagatgacttatcctctacaaggcttaacccgggaaggggacgcgcttgagttaacatgtgaagccatcgggaagccccagcctgtgatggtaacttgggtgagagtcgatgatgaaatgcctcaacacgccgtactgtctgggcccaacctgttcatcaataacctaaacaaaacagataatggtacataccgctgtgaagcttcaaacatagtggggaaagctcactcggattatatgctgtatgtatacg

SEQ ID NO: 58 - protein, 331 aa, Homo sapiens
MASVVLPSGSQCAAAAAAAAPPGLRLRLLLLLFSAAALIPTGDGQNLFTKDVTVIEGEVATISCQVNKSDDSVIQLLNPNRQTIYFRDFRPLKDSRFQLLNFSSSELKVSLTNVSISDEGRYFCQLYTDPPQESYTTITVLVPPRNLMIDIQKDTAVEGEEIEVNCTAMASKPATTIRWFKGNTELKGKSEVEEWSDMYTVTSQLMLKVHKEDDGVPVICQVEHPAVTGNLQTQRYLEVQYKPQVHIQMTYPLQGLTREGDALELTCEAIGKPQPVMVTWVRVDDEMPQHAVLSGPNLFINNLNKTDNGTYRCEASNIVGKAHSDYMLYVY

SEQ ID NO: 59-60 - skipped (2 entries)

SEQ ID NO: 61 - DNA, 200 bp, Homo sapiens
ctcattgcccagcggaccccagcctctgccaggttcggtccgccatcctcgtcccgtcctccgccggcccctgccccgcgcccagggatcctccagctcctttcgcccgcgccctccgttcgctccggacaccatggacaagttttggtggcacgcagcctggggactctgcctcgtgccgctgagcctggcgcagatcg

SEQ ID NO: 62 - DNA, 166 bp, Homo sapiens
atttgaatataacctgccgctttgcaggtgtattccacgtggagaaaaatggtcgctacagcatctctcggacggaggccgctgacctctgcaaggctttcaatagcaccttgcccacaatggcccagatggagaaagctctgagcatcggatttgagacctgcag

SEQ ID NO: 63 - DNA, 134 bp, Homo sapiens
gtatgggttcatagaagggcacgtggtgattccccggatccaccccaactccatctgtgcagcaaacaacacaggggtgtacatcctcacatccaacacctcccagtatgacacatattgcttcaatgcttcag

SEQ ID NO: 64 - DNA, 69 bp, Homo sapiens
ctccacctgaagaagattgtacatcagtcacagacctgcccaatgcctttgatggaccaattaccataa

SEQ ID NO: 65 - DNA, 231 bp, Homo sapiens
ctattgttaaccgtgatggcacccgctatgtccagaaaggagaatacagaacgaatcctgaagacatctaccccagcaaccctactgatgatgacgtgagcagcggctcctccagtgaaaggagcagcacttcaggaggttacatcttttacaccttttctactgtacaccccatcccagacgaagacagtccctggatcaccgacagcacagacagaatccctgctacca

SEQ ID NO: 66 - DNA, 129 bp, Homo sapiens
ctttgatgagcactagtgctacagcaactgagacagcaaccaagaggcaagaaacctgggattggttttcatggttgtttctaccatcagagtcaaagaatcatcttcacacaacaacacaaatggctg

SEQ ID NO: 67 - DNA, 126 bp, Homo sapiens
gtacgtcttcaaataccatctcagcaggctgggagccaaatgaagaaaatgaagatgaaagagacagacacctcagtttttctggatcaggcattgatgatgatgaagattttatctccagcacca

SEQ ID NO: 68 - DNA, 114 bp, Homo sapiens
tttcaaccacaccacgggcttttgaccacacaaaacagaaccaggactggacccagtggaacccaagccattcaaatccggaagtgctacttcagacaaccacaaggatgactg

SEQ ID NO: 69 - DNA, 117 bp, Homo sapiens
atgtagacagaaatggcaccactgcttatgaaggaaactggaacccagaagcacaccctcccctcattcaccatgagcatcatgaggaagaagagaccccacattctacaagcacaa

SEQ ID NO: 70 - DNA, 129 bp, Homo sapiens
tccaggcaactcctagtagtacaacggaagaaacagctacccagaaggaacagtggtttggcaacagatggcatgagggatatcgccaaacacccaaagaagactcccattcgacaacagggacagctg

SEQ ID NO: 71 - DNA, 132 bp, Homo sapiens
cagcctcagctcataccagccatccaatgcaaggaaggacaacaccaagcccagaggacagttcctggactgatttcttcaacccaatctcacaccccatgggacgaggtcatcaagcaggaagaaggatgg

SEQ ID NO: 72 - DNA, 102 bp, Homo sapiens
atatggactccagtcatagtataacgcttcagcctactgcaaatccaaacacaggtttggtggaagatttggacaggacaggacctctttcaatgacaacgc

SEQ ID NO: 73 - DNA, 90 bp, Homo sapiens
agcagagtaattctcagagcttctctacatcacatgaaggcttggaagaagataaagaccatccaacaacttctactctgacatcaagca

SEQ ID NO: 74 - DNA, 204 bp, Homo sapiens
ataggaatgatgtcacaggtggaagaagagacccaaatcattctgaaggctcaactactttactggaaggttatacctctcattacccacacacgaaggaaagcaggaccttcatcccagtgacctcagctaagactgggtcctttggagttactgcagttactgttggagattccaactctaatgtcaatcgttccttatcag

SEQ ID NO: 75 - DNA, 63 bp, Homo sapiens
gagaccaagacacattccaccccagtggggggtcccataccactcatggatctgaatcagatg

SEQ ID NO: 76 - DNA, 72 bp, Homo sapiens
gacactcacatgggagtcaagaaggtggagcaaacacaacctctggtcctataaggacaccccaaattccag

SEQ ID NO: 77 - DNA, 79 bp, Homo sapiens
aatggctgatcatcttggcatccctcttggccttggctttgattcttgcagtttgcattgcagtcaacagtcgaagaag

SEQ ID NO: 78 - DNA, 3274 bp, Homo sapiens
gtgtgggcagaagaaaaagctagtgatcaacagtggcaatggagctgtggaggacagaaagccaagtggactcaacggagaggccagcaagtctcaggaaatggtgcatttggtgaacaaggagtcgtcagaaactccagaccagtttatgacagctgatgagacaaggaacctgcagaatgtggacatgaagattggggtgtaacacctacaccattatcttggaaagaaacaaccgttggaaacataaccattacagggagctgggacacttaacagatgcaatgtgctactgattgtttcattgcgaatcttttttagcataaaattttctactctttttgttttttgtgttttgttctttaaagtcaggtccaatttgtaaaaacagcattgctttctgaaattagggcccaattaataatcagcaagaatttgatcgttccagttcccacttggaggcctttcatccctcgggtgtgctatggatggcttctaacaaaaactacacatatgtattcctgatcgccaacctttcccccaccagctaaggacatttcccagggttaatagggcctggtccctgggaggaaatttgaatgggtccattttgcccttccatagcctaatccctgggcattgctttccactgaggttgggggttggggtgtactagttacacatcttcaacagaccccctctagaaatttttcagatgcttctgggagacacccaaagggtgaagctatttatctgtagtaaactatttatctgtgtttttgaaatattaaaccctggatcagtcctttgatcagtataattttttaaagttactttgtcagaggcacaaaagggtttaaactgattcataataaatatctgtacttcttcgatcttcaccttttgtgctgtgattcttcagtttctaaaccagcactgtctgggtccctacaatgtatcaggaagagctgagaatggtaaggagactcttctaagtcttcatctcagagaccctgagttcccactcagacccactcagccaaatctcatggaagaccaaggagggcagcactgtttttgttttttgttttttgttttttttttttgacactgtccaaaggttttccatcctgtcctggaatcagagttggaagctgaggagcttcagcctcttttatggtttaatggccacctgttctctcctgtgaaaggctttgcaaagtcacattaagtttgcatgacctgttatccctggggccctatttcatagaggctggccctattagtgatttccaaaaacaatatggaagtgccttttgatgtcttacaataagagaagaagccaatggaaatgaaagagattggcaaaggggaaggatgatgccatgtagatcctgtttgacatttttatggctgtatttgtaaacttaaacacaccagtgtctgttcttgatgcagttgctatttaggatgagttaagtgcctggggagtccctcaaaaggttaaagggattcccatcattggaatcttatcaccagataggcaagtttatgaccaaacaagagagtactggctttatcctctaacctcatattttctcccacttggcaagtcctttgtggcatttattcatcagtcagggtgtccgattggtcctagaacttccaaaggctgcttgtcatagaagccattgcatctataaagcaacggctcctgttaaatggtatctcctttctgaggctcctactaaaagtcatttgttacctaaacttatgtgcttaacaggcaatgcttctcagaccacaaagcagaaagaagaagaaaagctcctgactaaatcagggctgggcttagacagagttgatctgtagaatatctttaaaggagagatgtcaactttctgcactattcccagcctctgctcctccctgtctaccctctcccctccctctctccctccacttcaccccacaatcttgaaaaacttcctttctcttctgtgaacatcattggccagatccattttcagtggtctggatttctttttattttcttttcaacttgaaagaaactggacattaggccactatgtgttgttactgccactagtgttcaagtgcctcttgttttcccagagatttcctgggtctgccagaggcccagacaggctcactcaagctctttaactgaaaagcaacaagccactccaggacaaggttcaaaatggttacaacagcctctacctgtcgccccagggagaaaggggtagtgatacaagtctcatagccagagatggttttccactccttctagatattcccaaaaagaggctgagacaggaggttattttcaattttattttggaattaaatacttttttccctttattactgttgtagtccctcacttggatatacctctgttttcacgatagaaataagggaggtctagagcttctattccttggccattgtcaacggagagctggccaagtcttcacaaacccttgcaacattgcctgaagtttatggaataagatgtattctcactcccttgatctcaagggcgtaactctggaagcacagcttgactacacgtcatttttaccaatgattttcaggtgacctgggctaagtcatttaaactgggtctttataaaagtaaaaggccaacatttaattattttgcaaagcaacctaagagctaaagatgtaatttttcttgcaattgtaaatcttttgtgtctcctgaagacttcccttaaaattagctctgagtgaaaaatcaaaagagacaaaagacatcttcgaatccatatttcaagcctggtagaattggcttttctagcagaacctttccaaaagttttatattgagattcataacaacaccaagaattgattttgtagccaacattcattcaatactgttatatcagaggagtaggagagaggaaacatttgacttatctggaaaagcaaaatgtacttaagaataagaataacatggtccattcacctttatgttatagatatgtctttgtgtaaatcatttgttttgagttttcaaagaatagcccattgttcattcttgtgctgtacaatgaccactgttattgttactttgacttttcagagcacacccttcctctggtttttgtatatttattgatggatcaataataatgaggaaagcatgatatgtatattgctgagttgaaagcacttattggaaaatattaaaaggctaacattaaaagactaaaggaaacaga

SEQ ID NO: 79 - DNA, 5431 bp, Homo sapiens
ctcattgcccagcggaccccagcctctgccaggttcggtccgccatcctcgtcccgtcctccgccggcccctgccccgcgcccagggatcctccagctcctttcgcccgcgccctccgttcgctccggacaccatggacaagttttggtggcacgcagcctggggactctgcctcgtgccgctgagcctggcgcagatcgatttgaatataacctgccgctttgcaggtgtattccacgtggagaaaaatggtcgctacagcatctctcggacggaggccgctgacctctgcaaggctttcaatagcaccttgcccacaatggcccagatggagaaagctctgagcatcggatttgagacctgcaggtatgggttcatagaagggcacgtggtgattccccggatccaccccaactccatctgtgcagcaaacaacacaggggtgtacatcctcacatccaacacctcccagtatgacacatattgcttcaatgcttcagctccacctgaagaagattgtacatcagtcacagacctgcccaatgcctttgatggaccaattaccataactattgttaaccgtgatggcacccgctatgtccagaaaggagaatacagaacgaatcctgaagacatctaccccagcaaccctactgatgatgacgtgagcagcggctcctccagtgaaaggagcagcacttcaggaggttacatcttttacaccttttctactgtacaccccatcccagacgaagacagtccctggatcaccgacagcacagacagaatccctgctaccactttgatgagcactagtgctacagcaactgagacagcaaccaagaggcaagaaacctgggattggttttcatggttgtttctaccatcagagtcaaagaatcatcttcacacaacaacacaaatggctggtacgtcttcaaataccatctcagcaggctgggagccaaatgaagaaaatgaagatgaaagagacagacacctcagtttttctggatcaggcattgatgatgatgaagattttatctccagcaccatttcaaccacaccacgggcttttgaccacacaaaacagaaccaggactggacccagtggaacccaagccattcaaatccggaagtgctacttcagacaaccacaaggatgactgatgtagacagaaatggcaccactgcttatgaaggaaactggaacccagaagcacaccctcccctcattcaccatgagcatcatgaggaagaagagaccccacattctacaagcacaatccaggcaactcctagtagtacaacggaagaaacagctacccagaaggaacagtggtttggcaacagatggcatgagggatatcgccaaacacccaaagaagactcccattcgacaacagggacagctgcagcctcagctcataccagccatccaatgcaaggaaggacaacaccaagcccagaggacagttcctggactgatttcttcaacccaatctcacaccccatgggacgaggtcatcaagcaggaagaaggatggatatggactccagtcatagtataacgcttcagcctactgcaaatccaaacacaggtttggtggaagatttggacaggacaggacctctttcaatgacaacgcagcagagtaattctcagagcttctctacatcacatgaaggcttggaagaagataaagaccatccaacaacttctactctgacatcaagcaataggaatgatgtcacaggtggaagaagagacccaaatcattctgaaggctcaactactttactggaaggttatacctctcattacccacacacgaaggaaagcaggaccttcatcccagtgacctcagctaagactgggtcctttggagttactgcagttactgttggagattccaactctaatgtcaatcgttccttatcaggagaccaagacacattccaccccagtggggggtcccataccactcatggatctgaatcagatggacactcacatgggagtcaagaaggtggagcaaacacaacctctggtcctataaggacaccccaaattccagaatggctgatcatcttggcatccctcttggccttggctttgattcttgcagtttgcattgcagtcaacagtcgaagaaggtgtgggcagaagaaaaagctagtgatcaacagtggcaatggagctgtggaggacagaaagccaagtggactcaacggagaggccagcaagtctcaggaaatggtgcatttggtgaacaaggagtcgtcagaaactccagaccagtttatgacagctgatgagacaaggaacctgcagaatgtggacatgaagattggggtgtaacacctacaccattatcttggaaagaaacaaccgttggaaacataaccattacagggagctgggacacttaacagatgcaatgtgctactgattgtttcattgcgaatcttttttagcataaaattttctactctttttgttttttgtgttttgttctttaaagtcaggtccaatttgtaaaaacagcattgctttctgaaattagggcccaattaataatcagcaagaatttgatcgttccagttcccacttggaggcctttcatccctcgggtgtgctatggatggcttctaacaaaaactacacatatgtattcctgatcgccaacctttcccccaccagctaaggacatttcccagggttaatagggcctggtccctgggaggaaatttgaatgggtccattttgcccttccatagcctaatccctgggcattgctttccactgaggttgggggttggggtgtactagttacacatcttcaacagaccccctctagaaatttttcagatgcttctgggagacacccaaagggtgaagctatttatctgtagtaaactatttatctgtgtttttgaaatattaaaccctggatcagtcctttgatcagtataattttttaaagttactttgtcagaggcacaaaagggtttaaactgattcataataaatatctgtacttcttcgatcttcaccttttgtgctgtgattcttcagtttctaaaccagcactgtctgggtccctacaatgtatcaggaagagctgagaatggtaaggagactcttctaagtcttcatctcagagaccctgagttcccactcagacccactcagccaaatctcatggaagaccaaggagggcagcactgtttttgttttttgttttttgttttttttttttgacactgtccaaaggttttccatcctgtcctggaatcagagttggaagctgaggagcttcagcctcttttatggtttaatggccacctgttctctcctgtgaaaggctttgcaaagtcacattaagtttgcatgacctgttatccctggggccctatttcatagaggctggccctattagtgatttccaaaaacaatatggaagtgccttttgatgtcttacaataagagaagaagccaatggaaatgaaagagattggcaaaggggaaggatgatgccatgtagatcctgtttgacatttttatggctgtatttgtaaacttaaacacaccagtgtctgttcttgatgcagttgctatttaggatgagttaagtgcctggggagtccctcaaaaggttaaagggattcccatcattggaatcttatcaccagataggcaagtttatgaccaaacaagagagtactggctttatcctctaacctcatattttctcccacttggcaagtcctttgtggcatttattcatcagtcagggtgtccgattggtcctagaacttccaaaggctgcttgtcatagaagccattgcatctataaagcaacggctcctgttaaatggtatctcctttctgaggctcctactaaaagtcatttgttacctaaacttatgtgcttaacaggcaatgcttctcagaccacaaagcagaaagaagaagaaaagctcctgactaaatcagggctgggcttagacagagttgatctgtagaatatctttaaaggagagatgtcaactttctgcactattcccagcctctgctcctccctgtctaccctctcccctccctctctccctccacttcaccccacaatcttgaaaaacttcctttctcttctgtgaacatcattggccagatccattttcagtggtctggatttctttttattttcttttcaacttgaaagaaactggacattaggccactatgtgttgttactgccactagtgttcaagtgcctcttgttttcccagagatttcctgggtctgccagaggcccagacaggctcactcaagctctttaactgaaaagcaacaagccactccaggacaaggttcaaaatggttacaacagcctctacctgtcgccccagggagaaaggggtagtgatacaagtctcatagccagagatggttttccactccttctagatattcccaaaaagaggctgagacaggaggttattttcaattttattttggaattaaatacttttttccctttattactgttgtagtccctcacttggatatacctctgttttcacgatagaaataagggaggtctagagcttctattccttggccattgtcaacggagagctggccaagtcttcacaaacccttgcaacattgcctgaagtttatggaataagatgtattctcactcccttgatctcaagggcgtaactctggaagcacagcttgactacacgtcatttttaccaatgattttcaggtgacctgggctaagtcatttaaactgggtctttataaaagtaaaaggccaacatttaattattttgcaaagcaacctaagagctaaagatgtaatttttcttgcaattgtaaatcttttgtgtctcctgaagacttcccttaaaattagctctgagtgaaaaatcaaaagagacaaaagacatcttcgaatccatatttcaagcctggtagaattggcttttctagcagaacctttccaaaagttttatattgagattcataacaacaccaagaattgattttgtagccaacattcattcaatactgttatatcagaggagtaggagagaggaaacatttgacttatctggaaaagcaaaatgtacttaagaataagaataacatggtccattcacctttatgttatagatatgtctttgtgtaaatcatttgttttgagttttcaaagaatagcccattgttcattcttgtgctgtacaatgaccactgttattgttactttgacttttcagagcacacccttcctctggtttttgtatatttattgatggatcaataataatgaggaaagcatgatatgtatattgctgagttgaaagcacttattggaaaatattaaaaggctaacattaaaagactaaaggaaacaga

SEQ ID NO: 80 - protein, 22 aa, Homo sapiens
MDKFWWHAAWGLCLVPLSLAQI

SEQ ID NO: 81 - protein, 54 aa, Homo sapiens
LNITCRFAGVFHVEKNGRYSISRTEAADLCKAFNSTLPTMAQMEKALSIGFETC

SEQ ID NO: 82 - protein, 44 aa, Homo sapiens
YGFIEGHVVIPRIHPNSICAANNTGVYILTSNTSQYDTYCFNAS

SEQ ID NO: 83 - protein, 22 aa, Homo sapiens
PPEEDCTSVTDLPNAFDGPITI

SEQ ID NO: 84 - protein, 76 aa, Homo sapiens
IVNRDGTRYVQKGEYRTNPEDIYPSNPTDDDVSSGSSSERSSTSGGYIFYTFSTVHPIPDEDSPWITDSTDRIPAT

SEQ ID NO: 85 - protein, 42 aa, Homo sapiens
LMSTSATATETATKRQETWDWFSWLFLPSESKNHLHTTTQMA

SEQ ID NO: 86 - protein, 41 aa, Homo sapiens
TSSNTISAGWEPNEENEDERDRHLSFSGSGIDDDEDFISST

SEQ ID NO: 87 - protein, 37 aa, Homo sapiens
STTPRAFDHTKQNQDWTQWNPSHSNPEVLLQTTTRMT

SEQ ID NO: 88 - protein, 38 aa, Homo sapiens
VDRNGTTAYEGNWNPEAHPPLIHHEHHEEEETPHSTST

SEQ ID NO: 89 - protein, 42 aa, Homo sapiens
QATPSSTTEETATQKEQWFGNRWHEGYRQTPKEDSHSTTGTA

SEQ ID NO: 90 - protein, 43 aa, Homo sapiens
ASAHTSHPMQGRTTPSPEDSSWTDFFNPISHPMGRGHQAGRRM

SEQ ID NO: 91 - protein, 33 aa, Homo sapiens
MDSSHSITLQPTANPNTGLVEDLDRTGPLSMTT

SEQ ID NO: 92 - protein, 29 aa, Homo sapiens
QSNSQSFSTSHEGLEEDKDHPTTSTLTSS

SEQ ID NO: 93 - protein, 67 aa, Homo sapiens
RNDVTGGRRDPNHSEGSTTLLEGYTSHYPHTKESRTFIPVTSAKTGSFGVTAVTVGDSNSNVNRSLS

SEQ ID NO: 94 - protein, 20 aa, Homo sapiens
DQDTFHPSGGSHTTHGSESD

SEQ ID NO: 95 - protein, 23 aa, Homo sapiens
HSHGSQEGGANTTSGPIRTPQIP

SEQ ID NO: 96 - protein, 25 aa, Homo sapiens
WLIILASLLALALILAVCIAVNSRR

SEQ ID NO: 97 - protein, 67 aa, Homo sapiens
CGQKKKLVINSGNGAVEDRKPSGLNGEASKSQEMVHLVNKESSETPDQFMTADETRNLQNVDMKIGV

SEQ ID NO: 98 - protein, 742 aa, Homo sapiens
MDKFWWHAAWGLCLVPLSLAQIDLNITCRFAGVFHVEKNGRYSISRTEAADLCKAFNSTLPTMAQMEKALSIGFETCRYGFIEGHVVIPRIHPNSICAANNTGVYILTSNTSQYDTYCFNASAPPEEDCTSVTDLPNAFDGPITITIVNRDGTRYVQKGEYRTNPEDIYPSNPTDDDVSSGSSSERSSTSGGYIFYTFSTVHPIPDEDSPWITDSTDRIPATTLMSTSATATETATKRQETWDWFSWLFLPSESKNHLHTTTQMAGTSSNTISAGWEPNEENEDERDRHLSFSGSGIDDDEDFISSTISTTPRAFDHTKQNQDWTQWNPSHSNPEVLLQTTTRMTDVDRNGTTAYEGNWNPEAHPPLIHHEHHEEEETPHSTSTIQATPSSTTEETATQKEQWFGNRWHEGYRQTPKEDSHSTTGTAAASAHTSHPMQGRTTPSPEDSSWTDFFNPISHPMGRGHQAGRRMDMDSSHSITLQPTANPNTGLVEDLDRTGPLSMTTQQSNSQSFSTSHEGLEEDKDHPTTSTLTSSNRNDVTGGRRDPNHSEGSTTLLEGYTSHYPHTKESRTFIPVTSAKTGSFGVTAVTVGDSNSNVNRSLSGDQDTFHPSGGSHTTHGSESDGHSHGSQEGGANTTSGPIRTPQIPEWLIILASLLALALILAVCIAVNSRRRCGQKKKLVINSGNGAVEDRKPSGLNGEASKSQEMVHLVNKESSETPDQFMTADETRNLQNVDMKIGV

SEQ ID NO: 99 - DNA, 800 bp, Homo sapiens
ctcattgcccagcggaccccagcctctgccaggttcggtccgccatcctcgtcccgtcctccgccggcccctgccccgcgcccagggatcctccagctcctttcgcccgcgccctccgttcgctccggacaccatggacaagttttggtggcacgcagcctggggactctgcctcgtgccgctgagcctggcgcagatcgatttgaatataacctgccgctttgcaggtgtattccacgtggagaaaaatggtcgctacagcatctctcggacggaggccgctgacctctgcaaggctttcaatagcaccttgcccacaatggcccagatggagaaagctctgagcatcggatttgagacctgcaggtatgggttcatagaagggcacgtggtgattccccggatccaccccaactccatctgtgcagcaaacaacacaggggtgtacatcctcacatccaacacctcccagtatgacacatattgcttcaatgcttcagctccacctgaagaagattgtacatcagtcacagacctgcccaatgcctttgatggaccaattaccataactattgttaaccgtgatggcacccgctatgtccagaaaggagaatacagaacgaatcctgaagacatctaccccagcaaccctactgatgatgacgtgagcagcggctcctccagtgaaaggagcagcacttcaggaggttacatcttttacaccttttctactgtacaccccatcccagacgaagacagtccctggatcaccgacagcacagacagaatccctgctacca

SEQ ID NO: 100 - protein, 222 aa, Homo sapiens
MDKFWWHAAWGLCLVPLSLAQIDLNITCRFAGVFHVEKNGRYSISRTEAADLCKAFNSTLPTMAQMEKALSIGFETCRYGFIEGHVVIPRIHPNSICAANNTGVYILTSNTSQYDTYCFNASAPPEEDCTSVTDLPNAFDGPITITIVNRDGTRYVQKGEYRTNPEDIYPSNPTDDDVSSGSSSERSSTSGGYIFYTFSTVHPIPDEDSPWITDSTDRIPAT

SEQ ID NO: 101-102 - skipped (2 entries)

SEQ ID NO: 103 - DNA, 552 bp, Homo sapiens
agatgcagtagccgaaactgcgcggaggcacagaggccggggagagcgttctgggtccgagggtccaggtaggggttgagccaccatctgaccgcaagctgcgtcgtgtcgccggttctgcaggcaccatgagccaggacaccgaggtggatatgaaggaggtggagctgaatgagttagagcccgagaagcagccgatgaacgcggcgtctggggcggccatgtccctggcgggagccgagaagaatggtctggtgaagatcaaggtggcggaagacgaggcggaggcggcagccgcggctaagttcacgggcctgtccaaggaggagctgctgaaggtggcaggcagccccggctgggtacgcacccgctgggcactgctgctgctcttctggctcggctggctcggcatgcttgctggtgccgtggtcataatcgtgcgagcgccgcgttgtcgcgagctaccggcgcagaagtggtggcacacgggcgccctctaccgcatcggcgaccttcaggccttccagggccacggcgcgggcaacctggcgg

SEQ ID NO: 104 - DNA, 174 bp, Homo sapiens
gtctgaaggggcgtctcgattacctgagctctctgaaggtgaagggccttgtgctgggtccaattcacaagaaccagaaggatgatgtcgctcagactgacttgctgcagatcgaccccaattttggctccaaggaagattttgacagtctcttgcaatcggctaaaaaaaaga

SEQ ID NO: 105 - DNA, 91 bp, Homo sapiens
gcatccgtgtcattctggaccttactcccaactaccggggtgagaactcgtggttctccactcaggttgacactgtggccaccaaggtgaa

SEQ ID NO: 106 - DNA, 69 bp, Homo sapiens
gatgctctggagttttggctgcaagctggcgtggatgggttccaggttcgggacatagagaatctgaag

SEQ ID NO: 107 - DNA, 59 bp, Homo sapiens
gatgcatcctcattcttggctgagtggcaaaatatcaccaagggcttcagtgaagacag

SEQ ID NO: 108 - DNA, 181 bp, Homo sapiens
gctcttgattgcggggactaactcctccgaccttcagcagatcctgagcctactcgaatccaacaaagacttgctgttgactagctcatacctgtctgattctggttctactggggagcatacaaaatccctagtcacacagtatttgaatgccactggcaatcgctggtgcagctggagt

SEQ ID NO: 109 - DNA, 144 bp, Homo sapiens
ttgtctcaggcaaggctcctgacttccttcttgccggctcaacttctccgactctaccagctgatgctcttcaccctgccagggacccctgttttcagctacggggatgagattggcctggatgcagctgcccttcctggacag

SEQ ID NO: 110 - DNA, 84 bp, Homo sapiens
cctatggaggctccagtcatgctgtgggatgagtccagcttccctgacatcccaggggctgtaagtgccaacatgactgtgaag

SEQ ID NO: 111 - DNA, 530 bp, Homo sapiens
ggccagagtgaagaccctggctccctcctttccttgttccggcggctgagtgaccagcggagtaaggagcgctccctactgcatggggacttccacgcgttctccgctgggcctggactcttctcctatatccgccactgggaccagaatgagcgttttctggtagtgcttaactttggggatgtgggcctctcggctggactgcaggcctccgacctgcctgccagcgccagcctgccagccaaggctgacctcctgctcagcacccagccaggccgtgaggagggctcccctcttgagctggaacgcctgaaactggagcctcacgaagggctgctgctccgcttcccctacgcggcctgacttcagcctgacatggacccactacccttctcctttccttcccaggccctttggcttctgatttttctcttttttaaaaacaaacaaacaaactgttgcagattatgagtgaacccccaaatagggtgttttctgccttcaaataaaagtcacccctgcatggtgaa

SEQ ID NO: 112 - DNA, 1884 bp, Homo sapiens
agatgcagtagccgaaactgcgcggaggcacagaggccggggagagcgttctgggtccgagggtccaggtaggggttgagccaccatctgaccgcaagctgcgtcgtgtcgccggttctgcaggcaccatgagccaggacaccgaggtggatatgaaggaggtggagctgaatgagttagagcccgagaagcagccgatgaacgcggcgtctggggcggccatgtccctggcgggagccgagaagaatggtctggtgaagatcaaggtggcggaagacgaggcggaggcggcagccgcggctaagttcacgggcctgtccaaggaggagctgctgaaggtggcaggcagccccggctgggtacgcacccgctgggcactgctgctgctcttctggctcggctggctcggcatgcttgctggtgccgtggtcataatcgtgcgagcgccgcgttgtcgcgagctaccggcgcagaagtggtggcacacgggcgccctctaccgcatcggcgaccttcaggccttccagggccacggcgcgggcaacctggcgggtctgaaggggcgtctcgattacctgagctctctgaaggtgaagggccttgtgctgggtccaattcacaagaaccagaaggatgatgtcgctcagactgacttgctgcagatcgaccccaattttggctccaaggaagattttgacagtctcttgcaatcggctaaaaaaaagagcatccgtgtcattctggaccttactcccaactaccggggtgagaactcgtggttctccactcaggttgacactgtggccaccaaggtgaagatgctctggagttttggctgcaagctggcgtggatgggttccaggttcgggacatagagaatctgaaggatgcatcctcattcttggctgagtggcaaaatatcaccaagggcttcagtgaagacaggctcttgattgcggggactaactcctccgaccttcagcagatcctgagcctactcgaatccaacaaagacttgctgttgactagctcatacctgtctgattctggttctactggggagcatacaaaatccctagtcacacagtatttgaatgccactggcaatcgctggtgcagctggagtttgtctcaggcaaggctcctgacttccttcttgccggctcaacttctccgactctaccagctgatgctcttcaccctgccagggacccctgttttcagctacggggatgagattggcctggatgcagctgcccttcctggacagcctatggaggctccagtcatgctgtgggatgagtccagcttccctgacatcccaggggctgtaagtgccaacatgactgtgaagggccagagtgaagaccctggctccctcctttccttgttccggcggctgagtgaccagcggagtaaggagcgctccctactgcatggggacttccacgcgttctccgctgggcctggactcttctcctatatccgccactgggaccagaatgagcgttttctggtagtgcttaactttggggatgtgggcctctcggctggactgcaggcctccgacctgcctgccagcgccagcctgccagccaaggctgacctcctgctcagcacccagccaggccgtgaggagggctcccctcttgagctggaacgcctgaaactggagcctcacgaagggctgctgctccgcttcccctacgcggcctgacttcagcctgacatggacccactacccttctcctttccttcccaggccctttggcttctgatttttctcttttttaaaaacaaacaaacaaactgttgcagattatgagtgaacccccaaatagggtgttttctgccttcaaataaaagtcacccctgcatggtgaa

SEQ ID NO: 113 - protein, 141 aa, Homo sapiens
MSQDTEVDMKEVELNELEPEKQPMNAASGAAMSLAGAEKNGLVKIKVAEDEAEAAAAAKFTGLSKEELLKVAGSPGWVRTRWALLLLFWLGWLGMLAGAVVIIVRAPRCRELPAQKWWHTGALYRIGDLQAFQGHGAGNLA

SEQ ID NO: 114 - protein, 57 aa, Homo sapiens
LKGRLDYLSSLKVKGLVLGPIHKNQKDDVAQTDLLQIDPNFGSKEDFDSLLQSAKKK

SEQ ID NO: 115 - protein, 29 aa, Homo sapiens
IRVILDLTPNYRGENSWFSTQVDTVATKV

SEQ ID NO: 116 - protein, 23 aa, Homo sapiens
DALEFWLQAGVDGFQVRDIENLK

SEQ ID NO: 117 - protein, 19 aa, Homo sapiens
DASSFLAEWQNITKGFSED

SEQ ID NO: 118 - protein, 60 aa, Homo sapiens
LLIAGTNSSDLQQILSLLESNKDLLLTSSYLSDSGSTGEHTKSLVTQYLNATGNRWCSWS

SEQ ID NO: 119 - protein, 48 aa, Homo sapiens
LSQARLLTSFLPAQLLRLYQLMLFTLPGTPVFSYGDEIGLDAAALPGQ

SEQ ID NO: 120 - protein, 28 aa, Homo sapiens
PMEAPVMLWDESSFPDIPGAVSANMTVK

SEQ ID NO: 121 - protein, 120 aa, Homo sapiens
GQSEDPGSLLSLFRRLSDQRSKERSLLHGDFHAFSAGPGLFSYIRHWDQNERFLVVLNFGDVGLSAGLQASDLPASASLPAKADLLLSTQPGREEGSPLELERLKLEPHEGLLLRFPYAA

SEQ ID NO: 122 - protein, 529 aa, Homo sapiens
MSQDTEVDMKEVELNELEPEKQPMNAASGAAMSLAGAEKNGLVKIKVAEDEAEAAAAAKFTGLSKEELLKVAGSPGWVRTRWALLLLFWLGWLGMLAGAVVIIVRAPRCRELPAQKWWHTGALYRIGDLQAFQGHGAGNLAGLKGRLDYLSSLKVKGLVLGPIHKNQKDDVAQTDLLQIDPNFGSKEDFDSLLQSAKKKSIRVILDLTPNYRGENSWFSTQVDTVATKVKDALEFWLQAGVDGFQVRDIENLKDASSFLAEWQNITKGFSEDRLLIAGTNSSDLQQILSLLESNKDLLLTSSYLSDSGSTGEHTKSLVTQYLNATGNRWCSWSLSQARLLTSFLPAQLLRLYQLMLFTLPGTPVFSYGDEIGLDAAALPGQPMEAPVMLWDESSFPDIPGAVSANMTVKGQSEDPGSLLSLFRRLSDQRSKERSLLHGDFHAFSAGPGLFSYIRHWDQNERFLVVLNFGDVGLSAGLQASDLPASASLPAKADLLLSTQPGREEGSPLELERLKLEPHEGLLLRFPYAA

SEQ ID NO: 123-124 - skipped (2 entries)

SEQ ID NO: 125 - DNA, 187 bp, Homo sapiens
agtaagcctccgcagcccactcggactgcagcctgtttgccgcccgtcctcccattgcagcactcggggcgacagagagggaggaggcgcgcggggacggggacgcccaggaggacccactcgcgggtcccgctccgctccggcagcagcatggggaaaggacgcgcgggccgagttggcaccacag

SEQ ID NO: 126 - DNA, 178 bp, Homo sapiens
ccttgcctccccgattgaaagagatgaaaagccaggaatcggctgcaggttccaaactagtccttcggtgtgaaaccagttctgaatactcctctctcagattcaagtggttcaagaatgggaatgaattgaatcgaaaaaacaaaccacaaaatatcaagatacaaaaaaagccagg

SEQ ID NO: 127 - DNA, 122 bp, Homo sapiens
gaagtcagaacttcgcattaacaaagcatcactggctgattctggagagtatatgtgcaaagtgatcagcaaattaggaaatgacagtgcctctgccaatatcaccatcgtggaatcaaacg

SEQ ID NO: 128 - DNA, 51 bp, Homo sapiens
agatcatcactggtatgccagcctcaactgaaggagcatatgtgtcttcag

SEQ ID NO: 129 - DNA, 51 bp, Homo sapiens
agtctcccattagaatatcagtatccacagaaggagcaaatacttcttcat

SEQ ID NO: 130 - DNA, 130 bp, Homo sapiens
ctacatctacatccaccactgggacaagccatcttgtaaaatgtgcggagaaggagaaaactttctgtgtgaatggaggggagtgcttcatggtgaaagacctttcaaacccctcgagatacttgtgcaa

SEQ ID NO: 131 - DNA, 59 bp, Homo sapiens
gtgcccaaatgagtttactggtgatcgctgccaaaactacgtaatggccagcttctaca

SEQ ID NO: 132 - DNA, 24 bp, Homo sapiens
agcatcttgggattgaatttatgg

SEQ ID NO: 133 - DNA, 103 bp, Homo sapiens
aggcggaggagctgtaccagaagagagtgctgaccataaccggcatctgcatcgccctccttgtggtcggcatcatgtgtgtggtggcctactgcaaaaccaa

SEQ ID NO: 134 - DNA, 127 bp, Homo sapiens
gaaacagcggaaaaagctgcatgaccgtcttcggcagagccttcggtctgaacgaaacaatatgatgaacattgccaatgggcctcaccatcctaacccaccccccgagaatgtccagctggtgaat

SEQ ID NO: 135 - DNA, 131 bp, Homo sapiens
caatacgtatctaaaaacgtcatctccagtgagcatattgttgagagagaagcagagacatccttttccaccagtcactatacttccacagcccatcactccactactgtcacccagactcctagccacag

SEQ ID NO: 136 - DNA, 207 bp, Homo sapiens
ctggagcaacggacacactgaaagcatcctttccgaaagccactctgtaatcgtgatgtcatccgtagaaaacagtaggcacagcagcccaactgggggcccaagaggacgtcttaatggcacaggaggccctcgtgaatgtaacagcttcctcaggcatgccagagaaacccctgattcctaccgagactctcctcatagtgaaag

SEQ ID NO: 137 - DNA, 10299 bp, Homo sapiens
gtatgtgtcagccatgaccaccccggctcgtatgtcacctgtagatttccacacgccaagctcccccaaatcgcccccttcggaaatgtctccacccgtgtccagcatgacggtgtccatgccttccatggcggtcagccccttcatggaagaagagagacctctacttctcgtgacaccaccaaggctgcgggagaagaagtttgaccatcaccctcagcagttcagctccttccaccacaaccccgcgcatgacagtaacagcctccctgctagccccttgaggatagtggaggatgaggagtatgaaacgacccaagagtacgagccagcccaagagcctgttaagaaactcgccaatagccggcgggccaaaagaaccaagcccaatggccacattgctaacagattggaagtggacagcaacacaagctcccagagcagtaactcagagagtgaaacagaagatgaaagagtaggtgaagatacgcctttcctgggcatacagaaccccctggcagccagtcttgaggcaacacctgccttccgcctggctgacagcaggactaacccagcaggccgcttctcgacacaggaagaaatccaggccaggctgtctagtgtaattgctaaccaagaccctattgctgtataaaacctaaataaacacatagattcacctgtaaaactttattttatataataaagtattccaccttaaattaaacaatttattttattttagcagttctgcaaatagaaaacaggaaaaaaacttttataaattaaatatatgtatgtaaaaatgtgttatgtgccatatgtagcaattttttacagtatttcaaaacgagaaagatatcaatggtgcctttatgttatgttatgtcgagagcaagttttgtacagttacagtgattgcttttccacagtatttctgcaaaacctctcatagattcagtttttgctggcttcttgtgcattgcattatgatgttgactggatgtatgatttgcaagacttgcaactgtccctctgtttgcttgtagtagcacccgatcagtatgtcttgtaatggcacatccatccagatatgcctctcttgtgtatgaagttttctttgctttcagaatatgaaatgagttgtgtctactctgccagccaaaggtttgcctcattgggctctgagataatagtagatccaacagcatgctactattaaatacagcaagaaactgcattaagtaatgttaaatattaggaagaaagtaatactgtgatttaaaaaaaactatattattaatcagaagacagcttgctcttactaaaaggagctctcatttactttatttgattttatttttcttgacaaaaagcaacagttttagggatagcttagaaaatgggttctggcttgctatcagggtaaatctaacaccttacaagaggactgagtgtcactttctctctgggggaatgatccagcagcttatctagttgacaatcaaaacacggctgataaaggtgcaatcatttctgacatgtatttttcactgattttgaagctagtgattggttgtgtcttcttggctcaaaaagaagcatattacggcacaaaaagcccagcccagacagcacatgcagcattttgtctgaaatacttctagagtcaaacgtgcctgctgtacatagcgatgacttgtcatcatagggaagtatttccatcgtagagtgttcagaaggagtgactgtataggtggagagaagcttagtgactccgttgaaattttaaaatgtggatgaccacccctttctcccccttatttttcttttatctttccatgttgccttgatcaggtcataactatgcatgaacattttttatcaggaatggccgatgtgtatgtgatttgtaatcacaagtaatgattcatcaggaaatgtcaatcctgttggaaagattgcacctttacttgcagaagtgacccccacctgtgtcctgacctctccatttacaggctctctcacccatttcccccacctcctttaatttttgctttactgtcataaagtaggactaagattggtctaagcattgcatgttcttttgtgatggtaaatccaaaggaaggcctataagtattaacatttgaaataactgctaattcaggaaaatggaagaaaaaaaattatttgaaacacagaacccatttcatggcctgcctgatatctgtgaaatcagggctggagctttacttaggattcacatggcctcctaggaaccatgggacaaatgggaaacaggttatcgggggattcatgaagtcagtgagagtaattgcttcttttttgcgggtgaactgaatgtatttcttcaccaaatcttgatgttaacaattaaaaagaagaaatgacatgcaagtaggtcttagcagaaaaatgcaggctgggcatgagtcatgttgttaccctcccacatgctcctacaatccacagagatgcctgtctgcaggttcttgaagttattgttagtatttggtatctcaaatttttcgtcactgttcacatgccactttctctgtgcacagtggtatcctcatttgctttttaacctacactgaggagtctttgtcaggttgcactgattttccaattctgcagtaatgagtaagctcacggcatggggaagaagacagtcagtccaatgaagttctctaaattattttaacattgcctttgaaggccttgactcatccttagctatttcaatgaagaaattcctaccatgaatttaaaaccctaaaaattctgtttcaaattctttgggcattggggtactcagatatcccattgtggaagaattttaagaataaatagaagtttctgttgagaaccatgagcaacatgtttcttacaatgagaattgctatgcattttaaaattgcaaatatatatgaaaattgaagacaagaggaaattgtatttctaacttgattctgatcactcacagaggtggcatattattatagttgggacatcctttgcacccttcataaaaaaggccagctgactgctcagcatcacctgccaaggccactagatttgtgtttacaggggtatctctgtgatgcttgtcacatcactcttgaccacctctgttaataaattccgacagtgcagtggcgatcggagtgtgaacttatgttcccagcatatggaaagctatcttaggttttaaggtagtagaaattgcccaggagtttgacagcaactttgtttcccgggtctaaaatcgtatcccactgaggtgtatgcagtggagcataatacatgcaaatacatgcaaaactccttttgtttcacctaagattcactttctatcttactttcccttcctgcctagtgtgacttttgcccccaagagtgcctggacagcattctagtttctacaaaatggtcctctgtgtaggtgaatgtgtcccaaacctgctatcactttcttgtttcagtgtgactgtcttgttagaggtgaagtttatccagggtaacttgctcactaactattcctttttatggcctggggttaaagggcgcatggctcacactggtgaaaataaggaaggcctggtcttatcttgtattaataatactggctgcattccaccagccagagatttctatctgcgaagacctatgaaacactgaagagaaatgtaggcagaaggaaatggccacatatcacaagttctattatatattcttttgtaaatacatattgtatattacttggatgttttcttatatcatttactgtctttttgagttaatgtcagtttttactctctcaacttactatgtaacattgtaaataacataatgtcctttattatttatatttaagcatctaacatatagagttgttttcatataagtttaagataaatgtcaaaaatatatgttcttttgtttttctttgctttaaaattatgtatcttttccttttcttttttttaagaataatttattgttcaggagaaagaatgtatatgtaactgaaactatctgaagaatgcacattgaaggccgtgaggtactgataaactaaagaatttattattcaaaatactaagcaataagtaattgtgatttatttaaagttttgtccattttccatgaaagacatactgcaataaaaatgctactctgtggagacctgggagtgttgctcagcagactacagcttcagtctgttagaccagcacctttcatctcattcccatagttatgctaatttaggattgtgttccatggaccccatgatcaccttgtctatacgttgcttcttgtctgtccattgcttttgccacaccacctgttctcaaatcatctcctccctaccaatgctgtttatcactttcttccttgttgaagaggccacacaaccagacagtactatgcttcctttttcctccatacacaataacagagagagaatattctagggcatgactgcctggatcctggctgttgctatcttttgtagtggcagtaagaaactccttcagactaatgaaaatgtcaacgtgccattcaatcacgaaaggtaacgaaaaatgctctcatggttcaaatagtccaatggcccatagtggcctaaaaggcagccagttgacacctggccatgctaagcttccttataccatccgctaatgactttccattgggcccacaatttacggattcataattttaaaagaggagaaggccaagttaggttcattccccttattctgtcaataaaacaaatcaaactcatgtctatctaactgctcagggaggagcctttgcatgagaaaattctcatattctaagactgagtcatagaaatgagggtattacttttcttactgcaattaacctaaacaaaagccatattttaacaaatagatatttgcatggtacccttcatatattccaagcatttcactcattattccaggtaggttaagagcttctgaagtgtatgaagtaaaggtcagcaatcctttggggtgaacagtggcctcctttggagtttgggggtaacctgagacttcccaccaatgtccacctccatctgtgtacctaattcctattacctagttatggctcctctaggatcatttccaaacactctggatgtccaggaaatttaaattgtagcttttgactgagctagtttttcctatttatattaataaattttcaaaaatgcttgaaatcttcacatttgcaacaactttagttttcatgcacatacaaacacagagagacaaaaattccaaacagacactctccaaaagccaccacactctttcacttgctctatagtcatttagccaaccagccatgcagagaatatttaaaacttaaagattgagacattattctcagtttttgctgaggctttgtaacgaaattgaacactataagcagctattgtagtaattttggttaaaattgtttgcctgggatatagtatttgaggcagaagcacgtgtgtgaaggaggtgaggtggtttggaaagagtgaagactcgcagccagattgaatgtctggataattactataattctcccttcttggttgaaaccatgttctctcttgatttttaaacccaggctgcctctggaaacaagcaaacctgagtctttctaacctgagtcttcccaatcattagatttcttttctgtcctaacgatgaatgataaaaggacttgatgttcacaatttggggttataaggcaggtctgaaatctggagactcaagatgctggaaggagtggaaagtttcgatgactttatatgaatcactttgcactctatgtttggcttgtcctctttgaaactgatttactaaaataaatgtaagggaactattactccaaaagattaacttggcaggaaataccaatactttcagtttatgaaagacaaaactgtcttgttgctacaggaagctgcaatgttcctaacctttaaggttggtgttgaatagggtggtcatgccctcccctgcaggtatctttaggctcctgttgacctcctggtactataactgttcgtcttctctgggtagctattgattttgaactttaacatgcttcaaaactttattcatcagggaaataggaaaagagttttgttacctggaggaaatctattgtgatctacctgagctttttaaaaacagaccaggagaaggaaaccagtaatttttaaagaagagacagagaatgggataatagtttcacccaggatctctttctaaccctttcccttcaaatgaacttattggaacagaattggaaagaagaaaggacatctctgcccaccccacaggatgccaaaaaggctaaagaattacctctgtagatttaaacatctttaatggcttatgtatagatttgctaatacagagagaaatgaactattaaataaaaatcacattttataatatttttatggcttaaaacatcctttatctcctttttgttctctctacatgatatggtaagtgatgaggaaaatttaggctcaggaaggttaaaatctttcttggagttacacatctaagagagctgcagagctgacacttgtacccaggttttctgactgcaaatccagtttctttctattgcgttcttcccctttccctgcctcaagcagaaacaggttttttattttcaacctttatgtatacagtatgttatgttacatctacagctaagtttctttttagaagaatgtgagcccttctagctttggtttagagtgattctagaagccaatttccttggcttagtgattctatgcacctttcctaaacttagctttctaaggaaatgaagtgtacgagtgagaatgaattcacaatttcgacatgtaggtagcatcctaaagtgaaaagaggaggaaatttgtggtcaaagcactctccccaccacttagaaacttactgactgtgggcagcttcctcctccaagtttccttcctgatttacaagaccgtggtgtggtcaggattaaacttgaatacatgtaaggaagcctgaaagtgtctaacacatagcgagtattcaaatgccaccttctatttgatccttcccctccagttccttaagttttggaatctaggtttctcagttccaaatggattgacatttgcatatccccattgcacaatggatcaaataaactttatgttatcatttctccaacatagtgccagtaagcaaatcctttttaataacaacagtatgttgagaaacatatcaccaaataatatttaactttgtagctttgataagttctttaggttttggttttggttttgttttctgagacagggtcttgatctgtcacccagactggagtgcaatggttcaattttagctcactgcaacctgtaactcctgagctcaagtgatcctcccacctcagcctctcaagtagctgggactacaggtgtgctccaccatgcccagcgatttttttttttttttttttttttttttttggtagggacaaggtctcgctatgttgcccaggctggtcttcaattcctggccttaagtgatcctcctgcctcggcctcccaaagtgctggaattacaggcatgagccaccacccataactttatgtttgtttttttgatgcagtataagttcagcttgcttcttatgcagccataccatttcatgttaactctgatttttagcagcttattacattagtgttttattattaatataattttacagaaatttactaaaccatgactctgtagagttttaataatactacctccaaacatcattgcaaacatctagaagaatgaacaaaaatgatcttagatcgacagtatatctgtttgtcttagtttctacacaggatgttcagacatattccatttctttaaaaaaaaaatatatatatatatatatatatataggcctggcacggtggctcatgactgtaatcccagcactttgggaggcttaggcaggcaaatcacctgaggtcaggagtttgagactggcctgaccaacatggtgaaacctcgtctctattaaaattacaaaaattagccgggcgtggtggcacatgcctgtaatcccagctactcgggaggctgaggcaggagaatcacttgaacctgggaggcagaggttgcagtgagttgagatcacgccattgcactccagccttggtgacaagagtgaaactccgtctcaaaaaaaaaaaaaatatgtatatatatatatatatatatatatatatatatatatatatatatataaaatcccaccaaaagtctgcagagtgaccaaattagacggctctggtttcagattaaattctaaatgtgagaaaccacatagctcccatgatccatccaataattcctcacgtcctcttcactctttactccatgcataaaacagaatttttttttctcatcctgggtatgaagcaattaataatttacggatttagcctatttggattcaatcccttcaaactccatactacatccaaggtggaagtgacttaaactctgatatcaatcatcaggcttgtaatataggctttgttaatggcaggagagtctaataaaactttctgttccttatccttcatttaaatgaaaaactttttattgaaaacaatcataactctagctcatcataaatataattcatgaggacattttattatttttatattaaagaaataatattatagatgtaaactttgcacctttctaattattatcatgagttaagctaatacttgtcttctggtccctagatgatgattcttttttgccttactggaggagcccttgtcttgaagtgagttgcttcaacagcagaggacttctagtttctcccagttgagcctaaagtgaacttttcatcttcttcagaggaaggggcttccttgatttgtacttttgtggctcctcagataacacagacaattttatcttggatcccaggttctcttcaccattaagaataagaaagagagaaaatgctgtgcatgacagccacctactccaaactacccaaccccctgtaaccaggtaccttccaacaacgagatgattctgccctcactcaagagtctcccccacaaagattccattctccctttactttttattttttatttttttgcaaaacaaaggcctcctttagtacctccttagtttataacccttatcttcccagctcttcccttcactgatacctctgatttcaaaagttctgaagtcggaagaccacacaatttcagactgtgaacagaaattcagtcagaaattattggagttagaaagaatttagagaaattgtattgaactagaaagtcctctttgattagtggtggccctttagaaagttctagggcagagtcccatggtgtttcatcttttccatgatttgcttgaccaaaaacttttctttcacaacatgaaaatatgctaatccaccacacattttggattctgctctgtttgcctgaggtgttagatctctagccaggactgtgaagggaaggaacttgaatccttcctattgagctattaatgcagagtcagtgagatgaagggttccactcggggtcaaaatcatgtcagttaccaagcaaaggagcaagtaaggggaaacatctcctcatctggttagtggagccacatttcacccactgatcaagccagacctgagcaatagtctagatttctccctccacatctaattggtgacaatggtgattgtaccactgacaggtcacacaagtccacaccctccttcacagcctcactgcttcggctcttgtttatgctcttatcagcatctgtcactaggatccatttgtctcctgactcatctacttcctttcactcccctgggccatccttcacatcatgctagaagactgtgtctaacttgcagaacttattgtgtcaatctcctggttacggcccctccatggctccccacctgacataggaggcccttcacaatctggcttctgtcactcataacttgtctccagccttcattcttcagtctgattttatggttttctagttccccaatacaccacaccagtgtttatgaaaccctagtcattggcctacgaactttatgattattgacatattcatgtaccacctgtattattttttgcatagtgtttatttttaattgactacatttttaactacaataaagtaatttcaactaaaa

SEQ ID NO: 138 - DNA, 11669 bp, Homo sapiens
agtaagcctccgcagcccactcggactgcagcctgtttgccgcccgtcctcccattgcagcactcggggcgacagagagggaggaggcgcgcggggacggggacgcccaggaggacccactcgcgggtcccgctccgctccggcagcagcatggggaaaggacgcgcgggccgagttggcaccacagccttgcctccccgattgaaagagatgaaaagccaggaatcggctgcaggttccaaactagtccttcggtgtgaaaccagttctgaatactcctctctcagattcaagtggttcaagaatgggaatgaattgaatcgaaaaaacaaaccacaaaatatcaagatacaaaaaaagccagggaagtcagaacttcgcattaacaaagcatcactggctgattctggagagtatatgtgcaaagtgatcagcaaattaggaaatgacagtgcctctgccaatatcaccatcgtggaatcaaacgagatcatcactggtatgccagcctcaactgaaggagcatatgtgtcttcagagtctcccattagaatatcagtatccacagaaggagcaaatacttcttcatctacatctacatccaccactgggacaagccatcttgtaaaatgtgcggagaaggagaaaactttctgtgtgaatggaggggagtgcttcatggtgaaagacctttcaaacccctcgagatacttgtgcaagtgcccaaatgagtttactggtgatcgctgccaaaactacgtaatggccagcttctacaagcatcttgggattgaatttatggaggcggaggagctgtaccagaagagagtgctgaccataaccggcatctgcatcgccctccttgtggtcggcatcatgtgtgtggtggcctactgcaaaaccaagaaacagcggaaaaagctgcatgaccgtcttcggcagagccttcggtctgaacgaaacaatatgatgaacattgccaatgggcctcaccatcctaacccaccccccgagaatgtccagctggtgaatcaatacgtatctaaaaacgtcatctccagtgagcatattgttgagagagaagcagagacatccttttccaccagtcactatacttccacagcccatcactccactactgtcacccagactcctagccacagctggagcaacggacacactgaaagcatcctttccgaaagccactctgtaatcgtgatgtcatccgtagaaaacagtaggcacagcagcccaactgggggcccaagaggacgtcttaatggcacaggaggccctcgtgaatgtaacagcttcctcaggcatgccagagaaacccctgattcctaccgagactctcctcatagtgaaaggtatgtgtcagccatgaccaccccggctcgtatgtcacctgtagatttccacacgccaagctcccccaaatcgcccccttcggaaatgtctccacccgtgtccagcatgacggtgtccatgccttccatggcggtcagccccttcatggaagaagagagacctctacttctcgtgacaccaccaaggctgcgggagaagaagtttgaccatcaccctcagcagttcagctccttccaccacaaccccgcgcatgacagtaacagcctccctgctagccccttgaggatagtggaggatgaggagtatgaaacgacccaagagtacgagccagcccaagagcctgttaagaaactcgccaatagccggcgggccaaaagaaccaagcccaatggccacattgctaacagattggaagtggacagcaacacaagctcccagagcagtaactcagagagtgaaacagaagatgaaagagtaggtgaagatacgcctttcctgggcatacagaaccccctggcagccagtcttgaggcaacacctgccttccgcctggctgacagcaggactaacccagcaggccgcttctcgacacaggaagaaatccaggccaggctgtctagtgtaattgctaaccaagaccctattgctgtataaaacctaaataaacacatagattcacctgtaaaactttattttatataataaagtattccaccttaaattaaacaatttattttattttagcagttctgcaaatagaaaacaggaaaaaaacttttataaattaaatatatgtatgtaaaaatgtgttatgtgccatatgtagcaattttttacagtatttcaaaacgagaaagatatcaatggtgcctttatgttatgttatgtcgagagcaagttttgtacagttacagtgattgcttttccacagtatttctgcaaaacctctcatagattcagtttttgctggcttcttgtgcattgcattatgatgttgactggatgtatgatttgcaagacttgcaactgtccctctgtttgcttgtagtagcacccgatcagtatgtcttgtaatggcacatccatccagatatgcctctcttgtgtatgaagttttctttgctttcagaatatgaaatgagttgtgtctactctgccagccaaaggtttgcctcattgggctctgagataatagtagatccaacagcatgctactattaaatacagcaagaaactgcattaagtaatgttaaatattaggaagaaagtaatactgtgatttaaaaaaaactatattattaatcagaagacagcttgctcttactaaaaggagctctcatttactttatttgattttatttttcttgacaaaaagcaacagttttagggatagcttagaaaatgggttctggcttgctatcagggtaaatctaacaccttacaagaggactgagtgtcactttctctctgggggaatgatccagcagcttatctagttgacaatcaaaacacggctgataaaggtgcaatcatttctgacatgtatttttcactgattttgaagctagtgattggttgtgtcttcttggctcaaaaagaagcatattacggcacaaaaagcccagcccagacagcacatgcagcattttgtctgaaatacttctagagtcaaacgtgcctgctgtacatagcgatgacttgtcatcatagggaagtatttccatcgtagagtgttcagaaggagtgactgtataggtggagagaagcttagtgactccgttgaaattttaaaatgtggatgaccacccctttctcccccttatttttcttttatctttccatgttgccttgatcaggtcataactatgcatgaacattttttatcaggaatggccgatgtgtatgtgatttgtaatcacaagtaatgattcatcaggaaatgtcaatcctgttggaaagattgcacctttacttgcagaagtgacccccacctgtgtcctgacctctccatttacaggctctctcacccatttcccccacctcctttaatttttgctttactgtcataaagtaggactaagattggtctaagcattgcatgttcttttgtgatggtaaatccaaaggaaggcctataagtattaacatttgaaataactgctaattcaggaaaatggaagaaaaaaaattatttgaaacacagaacccatttcatggcctgcctgatatctgtgaaatcagggctggagctttacttaggattcacatggcctcctaggaaccatgggacaaatgggaaacaggttatcgggggattcatgaagtcagtgagagtaattgcttcttttttgcgggtgaactgaatgtatttcttcaccaaatcttgatgttaacaattaaaaagaagaaatgacatgcaagtaggtcttagcagaaaaatgcaggctgggcatgagtcatgttgttaccctcccacatgctcctacaatccacagagatgcctgtctgcaggttcttgaagttattgttagtatttggtatctcaaatttttcgtcactgttcacatgccactttctctgtgcacagtggtatcctcatttgctttttaacctacactgaggagtctttgtcaggttgcactgattttccaattctgcagtaatgagtaagctcacggcatggggaagaagacagtcagtccaatgaagttctctaaattattttaacattgcctttgaaggccttgactcatccttagctatttcaatgaagaaattcctaccatgaatttaaaaccctaaaaattctgtttcaaattctttgggcattggggtactcagatatcccattgtggaagaattttaagaataaatagaagtttctgttgagaaccatgagcaacatgtttcttacaatgagaattgctatgcattttaaaattgcaaatatatatgaaaattgaagacaagaggaaattgtatttctaacttgattctgatcactcacagaggtggcatattattatagttgggacatcctttgcacccttcataaaaaaggccagctgactgctcagcatcacctgccaaggccactagatttgtgtttacaggggtatctctgtgatgcttgtcacatcactcttgaccacctctgttaataaattccgacagtgcagtggcgatcggagtgtgaacttatgttcccagcatatggaaagctatcttaggttttaaggtagtagaaattgcccaggagtttgacagcaactttgtttcccgggtctaaaatcgtatcccactgaggtgtatgcagtggagcataatacatgcaaatacatgcaaaactccttttgtttcacctaagattcactttctatcttactttcccttcctgcctagtgtgacttttgcccccaagagtgcctggacagcattctagtttctacaaaatggtcctctgtgtaggtgaatgtgtcccaaacctgctatcactttcttgtttcagtgtgactgtcttgttagaggtgaagtttatccagggtaacttgctcactaactattcctttttatggcctggggttaaagggcgcatggctcacactggtgaaaataaggaaggcctggtcttatcttgtattaataatactggctgcattccaccagccagagatttctatctgcgaagacctatgaaacactgaagagaaatgtaggcagaaggaaatggccacatatcacaagttctattatatattcttttgtaaatacatattgtatattacttggatgttttcttatatcatttactgtctttttgagttaatgtcagtttttactctctcaacttactatgtaacattgtaaataacataatgtcctttattatttatatttaagcatctaacatatagagttgttttcatataagtttaagataaatgtcaaaaatatatgttcttttgtttttctttgctttaaaattatgtatcttttccttttcttttttttaagaataatttattgttcaggagaaagaatgtatatgtaactgaaactatctgaagaatgcacattgaaggccgtgaggtactgataaactaaagaatttattattcaaaatactaagcaataagtaattgtgatttatttaaagttttgtccattttccatgaaagacatactgcaataaaaatgctactctgtggagacctgggagtgttgctcagcagactacagcttcagtctgttagaccagcacctttcatctcattcccatagttatgctaatttaggattgtgttccatggaccccatgatcaccttgtctatacgttgcttcttgtctgtccattgcttttgccacaccacctgttctcaaatcatctcctccctaccaatgctgtttatcactttcttccttgttgaagaggccacacaaccagacagtactatgcttcctttttcctccatacacaataacagagagagaatattctagggcatgactgcctggatcctggctgttgctatcttttgtagtggcagtaagaaactccttcagactaatgaaaatgtcaacgtgccattcaatcacgaaaggtaacgaaaaatgctctcatggttcaaatagtccaatggcccatagtggcctaaaaggcagccagttgacacctggccatgctaagcttccttataccatccgctaatgactttccattgggcccacaatttacggattcataattttaaaagaggagaaggccaagttaggttcattccccttattctgtcaataaaacaaatcaaactcatgtctatctaactgctcagggaggagcctttgcatgagaaaattctcatattctaagactgagtcatagaaatgagggtattacttttcttactgcaattaacctaaacaaaagccatattttaacaaatagatatttgcatggtacccttcatatattccaagcatttcactcattattccaggtaggttaagagcttctgaagtgtatgaagtaaaggtcagcaatcctttggggtgaacagtggcctcctttggagtttgggggtaacctgagacttcccaccaatgtccacctccatctgtgtacctaattcctattacctagttatggctcctctaggatcatttccaaacactctggatgtccaggaaatttaaattgtagcttttgactgagctagtttttcctatttatattaataaattttcaaaaatgcttgaaatcttcacatttgcaacaactttagttttcatgcacatacaaacacagagagacaaaaattccaaacagacactctccaaaagccaccacactctttcacttgctctatagtcatttagccaaccagccatgcagagaatatttaaaacttaaagattgagacattattctcagtttttgctgaggctttgtaacgaaattgaacactataagcagctattgtagtaattttggttaaaattgtttgcctgggatatagtatttgaggcagaagcacgtgtgtgaaggaggtgaggtggtttggaaagagtgaagactcgcagccagattgaatgtctggataattactataattctcccttcttggttgaaaccatgttctctcttgatttttaaacccaggctgcctctggaaacaagcaaacctgagtctttctaacctgagtcttcccaatcattagatttcttttctgtcctaacgatgaatgataaaaggacttgatgttcacaatttggggttataaggcaggtctgaaatctggagactcaagatgctggaaggagtggaaagtttcgatgactttatatgaatcactttgcactctatgtttggcttgtcctctttgaaactgatttactaaaataaatgtaagggaactattactccaaaagattaacttggcaggaaataccaatactttcagtttatgaaagacaaaactgtcttgttgctacaggaagctgcaatgttcctaacctttaaggttggtgttgaatagggtggtcatgccctcccctgcaggtatctttaggctcctgttgacctcctggtactataactgttcgtcttctctgggtagctattgattttgaactttaacatgcttcaaaactttattcatcagggaaataggaaaagagttttgttacctggaggaaatctattgtgatctacctgagctttttaaaaacagaccaggagaaggaaaccagtaatttttaaagaagagacagagaatgggataatagtttcacccaggatctctttctaaccctttcccttcaaatgaacttattggaacagaattggaaagaagaaaggacatctctgcccaccccacaggatgccaaaaaggctaaagaattacctctgtagatttaaacatctttaatggcttatgtatagatttgctaatacagagagaaatgaactattaaataaaaatcacattttataatatttttatggcttaaaacatcctttatctcctttttgttctctctacatgatatggtaagtgatgaggaaaatttaggctcaggaaggttaaaatctttcttggagttacacatctaagagagctgcagagctgacacttgtacccaggttttctgactgcaaatccagtttctttctattgcgttcttcccctttccctgcctcaagcagaaacaggttttttattttcaacctttatgtatacagtatgttatgttacatctacagctaagtttctttttagaagaatgtgagcccttctagctttggtttagagtgattctagaagccaatttccttggcttagtgattctatgcacctttcctaaacttagctttctaaggaaatgaagtgtacgagtgagaatgaattcacaatttcgacatgtaggtagcatcctaaagtgaaaagaggaggaaatttgtggtcaaagcactctccccaccacttagaaacttactgactgtgggcagcttcctcctccaagtttccttcctgatttacaagaccgtggtgtggtcaggattaaacttgaatacatgtaaggaagcctgaaagtgtctaacacatagcgagtattcaaatgccaccttctatttgatccttcccctccagttccttaagttttggaatctaggtttctcagttccaaatggattgacatttgcatatccccattgcacaatggatcaaataaactttatgttatcatttctccaacatagtgccagtaagcaaatcctttttaataacaacagtatgttgagaaacatatcaccaaataatatttaactttgtagctttgataagttctttaggttttggttttggttttgttttctgagacagggtcttgatctgtcacccagactggagtgcaatggttcaattttagctcactgcaacctgtaactcctgagctcaagtgatcctcccacctcagcctctcaagtagctgggactacaggtgtgctccaccatgcccagcgatttttttttttttttttttttttttttttggtagggacaaggtctcgctatgttgcccaggctggtcttcaattcctggccttaagtgatcctcctgcctcggcctcccaaagtgctggaattacaggcatgagccaccacccataactttatgtttgtttttttgatgcagtataagttcagcttgcttcttatgcagccataccatttcatgttaactctgatttttagcagcttattacattagtgttttattattaatataattttacagaaatttactaaaccatgactctgtagagttttaataatactacctccaaacatcattgcaaacatctagaagaatgaacaaaaatgatcttagatcgacagtatatctgtttgtcttagtttctacacaggatgttcagacatattccatttctttaaaaaaaaaatatatatatatatatatatatataggcctggcacggtggctcatgactgtaatcccagcactttgggaggcttaggcaggcaaatcacctgaggtcaggagtttgagactggcctgaccaacatggtgaaacctcgtctctattaaaattacaaaaattagccgggcgtggtggcacatgcctgtaatcccagctactcgggaggctgaggcaggagaatcacttgaacctgggaggcagaggttgcagtgagttgagatcacgccattgcactccagccttggtgacaagagtgaaactccgtctcaaaaaaaaaaaaaatatgtatatatatatatatatatatatatatatatatatatatatatatataaaatcccaccaaaagtctgcagagtgaccaaattagacggctctggtttcagattaaattctaaatgtgagaaaccacatagctcccatgatccatccaataattcctcacgtcctcttcactctttactccatgcataaaacagaatttttttttctcatcctgggtatgaagcaattaataatttacggatttagcctatttggattcaatcccttcaaactccatactacatccaaggtggaagtgacttaaactctgatatcaatcatcaggcttgtaatataggctttgttaatggcaggagagtctaataaaactttctgttccttatccttcatttaaatgaaaaactttttattgaaaacaatcataactctagctcatcataaatataattcatgaggacattttattatttttatattaaagaaataatattatagatgtaaactttgcacctttctaattattatcatgagttaagctaatacttgtcttctggtccctagatgatgattcttttttgccttactggaggagcccttgtcttgaagtgagttgcttcaacagcagaggacttctagtttctcccagttgagcctaaagtgaacttttcatcttcttcagaggaaggggcttccttgatttgtacttttgtggctcctcagataacacagacaattttatcttggatcccaggttctcttcaccattaagaataagaaagagagaaaatgctgtgcatgacagccacctactccaaactacccaaccccctgtaaccaggtaccttccaacaacgagatgattctgccctcactcaagagtctcccccacaaagattccattctccctttactttttattttttatttttttgcaaaacaaaggcctcctttagtacctccttagtttataacccttatcttcccagctcttcccttcactgatacctctgatttcaaaagttctgaagtcggaagaccacacaatttcagactgtgaacagaaattcagtcagaaattattggagttagaaagaatttagagaaattgtattgaactagaaagtcctctttgattagtggtggccctttagaaagttctagggcagagtcccatggtgtttcatcttttccatgatttgcttgaccaaaaacttttctttcacaacatgaaaatatgctaatccaccacacattttggattctgctctgtttgcctgaggtgttagatctctagccaggactgtgaagggaaggaacttgaatccttcctattgagctattaatgcagagtcagtgagatgaagggttccactcggggtcaaaatcatgtcagttaccaagcaaaggagcaagtaaggggaaacatctcctcatctggttagtggagccacatttcacccactgatcaagccagacctgagcaatagtctagatttctccctccacatctaattggtgacaatggtgattgtaccactgacaggtcacacaagtccacaccctccttcacagcctcactgcttcggctcttgtttatgctcttatcagcatctgtcactaggatccatttgtctcctgactcatctacttcctttcactcccctgggccatccttcacatcatgctagaagactgtgtctaacttgcagaacttattgtgtcaatctcctggttacggcccctccatggctccccacctgacataggaggcccttcacaatctggcttctgtcactcataacttgtctccagccttcattcttcagtctgattttatggttttctagttccccaatacaccacaccagtgtttatgaaaccctagtcattggcctacgaactttatgattattgacatattcatgtaccacctgtattattttttgcatagtgtttatttttaattgactacatttttaactacaataaagtaatttcaactaaaa

SEQ ID NO: 139 - protein, 12 aa, Homo sapiens
MGKGRAGRVGTT

SEQ ID NO: 140 - protein, 58 aa, Homo sapiens
LPPRLKEMKSQESAAGSKLVLRCETSSEYSSLRFKWFKNGNELNRKNKPQNIKIQKKP

SEQ ID NO: 141 - protein, 40 aa, Homo sapiens
KSELRINKASLADSGEYMCKVISKLGNDSASANITIVESN

SEQ ID NO: 142 - protein, 16 aa, Homo sapiens
IITGMPASTEGAYVSS

SEQ ID NO: 143 - protein, 16 aa, Homo sapiens
SPIRISVSTEGANTSS

SEQ ID NO: 144 - protein, 42 aa, Homo sapiens
TSTSTTGTSHLVKCAEKEKTFCVNGGECFMVKDLSNPSRYLC

SEQ ID NO: 145 - protein, 19 aa, Homo sapiens
CPNEFTGDRCQNYVMASFY

SEQ ID NO: 146 - protein, 7 aa, Homo sapiens
HLGIEFM

SEQ ID NO: 147 - protein, 33 aa, Homo sapiens
AEELYQKRVLTITGICIALLVVGIMCVVAYCKT

SEQ ID NO: 148 - protein, 42 aa, Homo sapiens
KQRKKLHDRLRQSLRSERNNMMNIANGPHHPNPPPENVQLVN

SEQ ID NO: 149 - protein, 43 aa, Homo sapiens
QYVSKNVISSEHIVEREAETSFSTSHYTSTAHHSTTVTQTPSH

SEQ ID NO: 150 - protein, 68 aa, Homo sapiens
WSNGHTESILSESHSVIVMSSVENSRHSSPTGGPRGRLNGTGGPRECNSFLRHARETPDSYRDSPHSE

SEQ ID NO: 151 - protein, 217 aa, Homo sapiens
YVSAMTTPARMSPVDFHTPSSPKSPPSEMSPPVSSMTVSMPSMAVSPFMEEERPLLLVTPPRLREKKFDHHPQQFSSFHHNPAHDSNSLPASPLRIVEDEEYETTQEYEPAQEPVKKLANSRRAKRTKPNGHIANRLEVDSNTSSQSSNSESETEDERVGEDTPFLGIQNPLAASLEATPAFRLADSRTNPAGRFSTQEEIQARLSSVIANQDPIAV

SEQ ID NO: 152 - protein, 624 aa, Homo sapiens
MGKGRAGRVGTTALPPRLKEMKSQESAAGSKLVLRCETSSEYSSLRFKWFKNGNELNRKNKPQNIKIQKKPGKSELRINKASLADSGEYMCKVISKLGNDSASANITIVESNEIITGMPASTEGAYVSSESPIRISVSTEGANTSSSTSTSTTGTSHLVKCAEKEKTFCVNGGECFMVKDLSNPSRYLCKCPNEFTGDRCQNYVMASFYKHLGIEFMEAEELYQKRVLTITGICIALLVVGIMCVVAYCKTKKQRKKLHDRLRQSLRSERNNMMNIANGPHHPNPPPENVQLVNQYVSKNVISSEHIVEREAETSFSTSHYTSTAHHSTTVTQTPSHSWSNGHTESILSESHSVIVMSSVENSRHSSPTGGPRGRLNGTGGPRECNSFLRHARETPDSYRDSPHSERYVSAMTTPARMSPVDFHTPSSPKSPPSEMSPPVSSMTVSMPSMAVSPFMEEERPLLLVTPPRLREKKFDHHPQQFSSFHHNPAHDSNSLPASPLRIVEDEEYETTQEYEPAQEPVKKLANSRRAKRTKPNGHIANRLEVDSNTSSQSSNSESETEDERVGEDTPFLGIQNPLAASLEATPAFRLADSRTNPAGRFSTQEEIQARLSSVIANQDPIAV

SEQ ID NO: 153 - DNA, 11482 bp, Homo sapiens
ccttgcctccccgattgaaagagatgaaaagccaggaatcggctgcaggttccaaactagtccttcggtgtgaaaccagttctgaatactcctctctcagattcaagtggttcaagaatgggaatgaattgaatcgaaaaaacaaaccacaaaatatcaagatacaaaaaaagccagggaagtcagaacttcgcattaacaaagcatcactggctgattctggagagtatatgtgcaaagtgatcagcaaattaggaaatgacagtgcctctgccaatatcaccatcgtggaatcaaacgagatcatcactggtatgccagcctcaactgaaggagcatatgtgtcttcagagtctcccattagaatatcagtatccacagaaggagcaaatacttcttcatctacatctacatccaccactgggacaagccatcttgtaaaatgtgcggagaaggagaaaactttctgtgtgaatggaggggagtgcttcatggtgaaagacctttcaaacccctcgagatacttgtgcaagtgcccaaatgagtttactggtgatcgctgccaaaactacgtaatggccagcttctacaagcatcttgggattgaatttatggaggcggaggagctgtaccagaagagagtgctgaccataaccggcatctgcatcgccctccttgtggtcggcatcatgtgtgtggtggcctactgcaaaaccaagaaacagcggaaaaagctgcatgaccgtcttcggcagagccttcggtctgaacgaaacaatatgatgaacattgccaatgggcctcaccatcctaacccaccccccgagaatgtccagctggtgaatcaatacgtatctaaaaacgtcatctccagtgagcatattgttgagagagaagcagagacatccttttccaccagtcactatacttccacagcccatcactccactactgtcacccagactcctagccacagctggagcaacggacacactgaaagcatcctttccgaaagccactctgtaatcgtgatgtcatccgtagaaaacagtaggcacagcagcccaactgggggcccaagaggacgtcttaatggcacaggaggccctcgtgaatgtaacagcttcctcaggcatgccagagaaacccctgattcctaccgagactctcctcatagtgaaaggtatgtgtcagccatgaccaccccggctcgtatgtcacctgtagatttccacacgccaagctcccccaaatcgcccccttcggaaatgtctccacccgtgtccagcatgacggtgtccatgccttccatggcggtcagccccttcatggaagaagagagacctctacttctcgtgacaccaccaaggctgcgggagaagaagtttgaccatcaccctcagcagttcagctccttccaccacaaccccgcgcatgacagtaacagcctccctgctagccccttgaggatagtggaggatgaggagtatgaaacgacccaagagtacgagccagcccaagagcctgttaagaaactcgccaatagccggcgggccaaaagaaccaagcccaatggccacattgctaacagattggaagtggacagcaacacaagctcccagagcagtaactcagagagtgaaacagaagatgaaagagtaggtgaagatacgcctttcctgggcatacagaaccccctggcagccagtcttgaggcaacacctgccttccgcctggctgacagcaggactaacccagcaggccgcttctcgacacaggaagaaatccaggccaggctgtctagtgtaattgctaaccaagaccctattgctgtataaaacctaaataaacacatagattcacctgtaaaactttattttatataataaagtattccaccttaaattaaacaatttattttattttagcagttctgcaaatagaaaacaggaaaaaaacttttataaattaaatatatgtatgtaaaaatgtgttatgtgccatatgtagcaattttttacagtatttcaaaacgagaaagatatcaatggtgcctttatgttatgttatgtcgagagcaagttttgtacagttacagtgattgcttttccacagtatttctgcaaaacctctcatagattcagtttttgctggcttcttgtgcattgcattatgatgttgactggatgtatgatttgcaagacttgcaactgtccctctgtttgcttgtagtagcacccgatcagtatgtcttgtaatggcacatccatccagatatgcctctcttgtgtatgaagttttctttgctttcagaatatgaaatgagttgtgtctactctgccagccaaaggtttgcctcattgggctctgagataatagtagatccaacagcatgctactattaaatacagcaagaaactgcattaagtaatgttaaatattaggaagaaagtaatactgtgatttaaaaaaaactatattattaatcagaagacagcttgctcttactaaaaggagctctcatttactttatttgattttatttttcttgacaaaaagcaacagttttagggatagcttagaaaatgggttctggcttgctatcagggtaaatctaacaccttacaagaggactgagtgtcactttctctctgggggaatgatccagcagcttatctagttgacaatcaaaacacggctgataaaggtgcaatcatttctgacatgtatttttcactgattttgaagctagtgattggttgtgtcttcttggctcaaaaagaagcatattacggcacaaaaagcccagcccagacagcacatgcagcattttgtctgaaatacttctagagtcaaacgtgcctgctgtacatagcgatgacttgtcatcatagggaagtatttccatcgtagagtgttcagaaggagtgactgtataggtggagagaagcttagtgactccgttgaaattttaaaatgtggatgaccacccctttctcccccttatttttcttttatctttccatgttgccttgatcaggtcataactatgcatgaacattttttatcaggaatggccgatgtgtatgtgatttgtaatcacaagtaatgattcatcaggaaatgtcaatcctgttggaaagattgcacctttacttgcagaagtgacccccacctgtgtcctgacctctccatttacaggctctctcacccatttcccccacctcctttaatttttgctttactgtcataaagtaggactaagattggtctaagcattgcatgttcttttgtgatggtaaatccaaaggaaggcctataagtattaacatttgaaataactgctaattcaggaaaatggaagaaaaaaaattatttgaaacacagaacccatttcatggcctgcctgatatctgtgaaatcagggctggagctttacttaggattcacatggcctcctaggaaccatgggacaaatgggaaacaggttatcgggggattcatgaagtcagtgagagtaattgcttcttttttgcgggtgaactgaatgtatttcttcaccaaatcttgatgttaacaattaaaaagaagaaatgacatgcaagtaggtcttagcagaaaaatgcaggctgggcatgagtcatgttgttaccctcccacatgctcctacaatccacagagatgcctgtctgcaggttcttgaagttattgttagtatttggtatctcaaatttttcgtcactgttcacatgccactttctctgtgcacagtggtatcctcatttgctttttaacctacactgaggagtctttgtcaggttgcactgattttccaattctgcagtaatgagtaagctcacggcatggggaagaagacagtcagtccaatgaagttctctaaattattttaacattgcctttgaaggccttgactcatccttagctatttcaatgaagaaattcctaccatgaatttaaaaccctaaaaattctgtttcaaattctttgggcattggggtactcagatatcccattgtggaagaattttaagaataaatagaagtttctgttgagaaccatgagcaacatgtttcttacaatgagaattgctatgcattttaaaattgcaaatatatatgaaaattgaagacaagaggaaattgtatttctaacttgattctgatcactcacagaggtggcatattattatagttgggacatcctttgcacccttcataaaaaaggccagctgactgctcagcatcacctgccaaggccactagatttgtgtttacaggggtatctctgtgatgcttgtcacatcactcttgaccacctctgttaataaattccgacagtgcagtggcgatcggagtgtgaacttatgttcccagcatatggaaagctatcttaggttttaaggtagtagaaattgcccaggagtttgacagcaactttgtttcccgggtctaaaatcgtatcccactgaggtgtatgcagtggagcataatacatgcaaatacatgcaaaactccttttgtttcacctaagattcactttctatcttactttcccttcctgcctagtgtgacttttgcccccaagagtgcctggacagcattctagtttctacaaaatggtcctctgtgtaggtgaatgtgtcccaaacctgctatcactttcttgtttcagtgtgactgtcttgttagaggtgaagtttatccagggtaacttgctcactaactattcctttttatggcctggggttaaagggcgcatggctcacactggtgaaaataaggaaggcctggtcttatcttgtattaataatactggctgcattccaccagccagagatttctatctgcgaagacctatgaaacactgaagagaaatgtaggcagaaggaaatggccacatatcacaagttctattatatattcttttgtaaatacatattgtatattacttggatgttttcttatatcatttactgtctttttgagttaatgtcagtttttactctctcaacttactatgtaacattgtaaataacataatgtcctttattatttatatttaagcatctaacatatagagttgttttcatataagtttaagataaatgtcaaaaatatatgttcttttgtttttctttgctttaaaattatgtatcttttccttttcttttttttaagaataatttattgttcaggagaaagaatgtatatgtaactgaaactatctgaagaatgcacattgaaggccgtgaggtactgataaactaaagaatttattattcaaaatactaagcaataagtaattgtgatttatttaaagttttgtccattttccatgaaagacatactgcaataaaaatgctactctgtggagacctgggagtgttgctcagcagactacagcttcagtctgttagaccagcacctttcatctcattcccatagttatgctaatttaggattgtgttccatggaccccatgatcaccttgtctatacgttgcttcttgtctgtccattgcttttgccacaccacctgttctcaaatcatctcctccctaccaatgctgtttatcactttcttccttgttgaagaggccacacaaccagacagtactatgcttcctttttcctccatacacaataacagagagagaatattctagggcatgactgcctggatcctggctgttgctatcttttgtagtggcagtaagaaactccttcagactaatgaaaatgtcaacgtgccattcaatcacgaaaggtaacgaaaaatgctctcatggttcaaatagtccaatggcccatagtggcctaaaaggcagccagttgacacctggccatgctaagcttccttataccatccgctaatgactttccattgggcccacaatttacggattcataattttaaaagaggagaaggccaagttaggttcattccccttattctgtcaataaaacaaatcaaactcatgtctatctaactgctcagggaggagcctttgcatgagaaaattctcatattctaagactgagtcatagaaatgagggtattacttttcttactgcaattaacctaaacaaaagccatattttaacaaatagatatttgcatggtacccttcatatattccaagcatttcactcattattccaggtaggttaagagcttctgaagtgtatgaagtaaaggtcagcaatcctttggggtgaacagtggcctcctttggagtttgggggtaacctgagacttcccaccaatgtccacctccatctgtgtacctaattcctattacctagttatggctcctctaggatcatttccaaacactctggatgtccaggaaatttaaattgtagcttttgactgagctagtttttcctatttatattaataaattttcaaaaatgcttgaaatcttcacatttgcaacaactttagttttcatgcacatacaaacacagagagacaaaaattccaaacagacactctccaaaagccaccacactctttcacttgctctatagtcatttagccaaccagccatgcagagaatatttaaaacttaaagattgagacattattctcagtttttgctgaggctttgtaacgaaattgaacactataagcagctattgtagtaattttggttaaaattgtttgcctgggatatagtatttgaggcagaagcacgtgtgtgaaggaggtgaggtggtttggaaagagtgaagactcgcagccagattgaatgtctggataattactataattctcccttcttggttgaaaccatgttctctcttgatttttaaacccaggctgcctctggaaacaagcaaacctgagtctttctaacctgagtcttcccaatcattagatttcttttctgtcctaacgatgaatgataaaaggacttgatgttcacaatttggggttataaggcaggtctgaaatctggagactcaagatgctggaaggagtggaaagtttcgatgactttatatgaatcactttgcactctatgtttggcttgtcctctttgaaactgatttactaaaataaatgtaagggaactattactccaaaagattaacttggcaggaaataccaatactttcagtttatgaaagacaaaactgtcttgttgctacaggaagctgcaatgttcctaacctttaaggttggtgttgaatagggtggtcatgccctcccctgcaggtatctttaggctcctgttgacctcctggtactataactgttcgtcttctctgggtagctattgattttgaactttaacatgcttcaaaactttattcatcagggaaataggaaaagagttttgttacctggaggaaatctattgtgatctacctgagctttttaaaaacagaccaggagaaggaaaccagtaatttttaaagaagagacagagaatgggataatagtttcacccaggatctctttctaaccctttcccttcaaatgaacttattggaacagaattggaaagaagaaaggacatctctgcccaccccacaggatgccaaaaaggctaaagaattacctctgtagatttaaacatctttaatggcttatgtatagatttgctaatacagagagaaatgaactattaaataaaaatcacattttataatatttttatggcttaaaacatcctttatctcctttttgttctctctacatgatatggtaagtgatgaggaaaatttaggctcaggaaggttaaaatctttcttggagttacacatctaagagagctgcagagctgacacttgtacccaggttttctgactgcaaatccagtttctttctattgcgttcttcccctttccctgcctcaagcagaaacaggttttttattttcaacctttatgtatacagtatgttatgttacatctacagctaagtttctttttagaagaatgtgagcccttctagctttggtttagagtgattctagaagccaatttccttggcttagtgattctatgcacctttcctaaacttagctttctaaggaaatgaagtgtacgagtgagaatgaattcacaatttcgacatgtaggtagcatcctaaagtgaaaagaggaggaaatttgtggtcaaagcactctccccaccacttagaaacttactgactgtgggcagcttcctcctccaagtttccttcctgatttacaagaccgtggtgtggtcaggattaaacttgaatacatgtaaggaagcctgaaagtgtctaacacatagcgagtattcaaatgccaccttctatttgatccttcccctccagttccttaagttttggaatctaggtttctcagttccaaatggattgacatttgcatatccccattgcacaatggatcaaataaactttatgttatcatttctccaacatagtgccagtaagcaaatcctttttaataacaacagtatgttgagaaacatatcaccaaataatatttaactttgtagctttgataagttctttaggttttggttttggttttgttttctgagacagggtcttgatctgtcacccagactggagtgcaatggttcaattttagctcactgcaacctgtaactcctgagctcaagtgatcctcccacctcagcctctcaagtagctgggactacaggtgtgctccaccatgcccagcgatttttttttttttttttttttttttttttggtagggacaaggtctcgctatgttgcccaggctggtcttcaattcctggccttaagtgatcctcctgcctcggcctcccaaagtgctggaattacaggcatgagccaccacccataactttatgtttgtttttttgatgcagtataagttcagcttgcttcttatgcagccataccatttcatgttaactctgatttttagcagcttattacattagtgttttattattaatataattttacagaaatttactaaaccatgactctgtagagttttaataatactacctccaaacatcattgcaaacatctagaagaatgaacaaaaatgatcttagatcgacagtatatctgtttgtcttagtttctacacaggatgttcagacatattccatttctttaaaaaaaaaatatatatatatatatatatatataggcctggcacggtggctcatgactgtaatcccagcactttgggaggcttaggcaggcaaatcacctgaggtcaggagtttgagactggcctgaccaacatggtgaaacctcgtctctattaaaattacaaaaattagccgggcgtggtggcacatgcctgtaatcccagctactcgggaggctgaggcaggagaatcacttgaacctgggaggcagaggttgcagtgagttgagatcacgccattgcactccagccttggtgacaagagtgaaactccgtctcaaaaaaaaaaaaaatatgtatatatatatatatatatatatatatatatatatatatatatatataaaatcccaccaaaagtctgcagagtgaccaaattagacggctctggtttcagattaaattctaaatgtgagaaaccacatagctcccatgatccatccaataattcctcacgtcctcttcactctttactccatgcataaaacagaatttttttttctcatcctgggtatgaagcaattaataatttacggatttagcctatttggattcaatcccttcaaactccatactacatccaaggtggaagtgacttaaactctgatatcaatcatcaggcttgtaatataggctttgttaatggcaggagagtctaataaaactttctgttccttatccttcatttaaatgaaaaactttttattgaaaacaatcataactctagctcatcataaatataattcatgaggacattttattatttttatattaaagaaataatattatagatgtaaactttgcacctttctaattattatcatgagttaagctaatacttgtcttctggtccctagatgatgattcttttttgccttactggaggagcccttgtcttgaagtgagttgcttcaacagcagaggacttctagtttctcccagttgagcctaaagtgaacttttcatcttcttcagaggaaggggcttccttgatttgtacttttgtggctcctcagataacacagacaattttatcttggatcccaggttctcttcaccattaagaataagaaagagagaaaatgctgtgcatgacagccacctactccaaactacccaaccccctgtaaccaggtaccttccaacaacgagatgattctgccctcactcaagagtctcccccacaaagattccattctccctttactttttattttttatttttttgcaaaacaaaggcctcctttagtacctccttagtttataacccttatcttcccagctcttcccttcactgatacctctgatttcaaaagttctgaagtcggaagaccacacaatttcagactgtgaacagaaattcagtcagaaattattggagttagaaagaatttagagaaattgtattgaactagaaagtcctctttgattagtggtggccctttagaaagttctagggcagagtcccatggtgtttcatcttttccatgatttgcttgaccaaaaacttttctttcacaacatgaaaatatgctaatccaccacacattttggattctgctctgtttgcctgaggtgttagatctctagccaggactgtgaagggaaggaacttgaatccttcctattgagctattaatgcagagtcagtgagatgaagggttccactcggggtcaaaatcatgtcagttaccaagcaaaggagcaagtaaggggaaacatctcctcatctggttagtggagccacatttcacccactgatcaagccagacctgagcaatagtctagatttctccctccacatctaattggtgacaatggtgattgtaccactgacaggtcacacaagtccacaccctccttcacagcctcactgcttcggctcttgtttatgctcttatcagcatctgtcactaggatccatttgtctcctgactcatctacttcctttcactcccctgggccatccttcacatcatgctagaagactgtgtctaacttgcagaacttattgtgtcaatctcctggttacggcccctccatggctccccacctgacataggaggcccttcacaatctggcttctgtcactcataacttgtctccagccttcattcttcagtctgattttatggttttctagttccccaatacaccacaccagtgtttatgaaaccctagtcattggcctacgaactttatgattattgacatattcatgtaccacctgtattattttttgcatagtgtttatttttaattgactacatttttaactacaataaagtaatttcaactaaaa

SEQ ID NO: 154 - protein, 611 aa, Homo sapiens
LPPRLKEMKSQESAAGSKLVLRCETSSEYSSLRFKWFKNGNELNRKNKPQNIKIQKKPGKSELRINKASLADSGEYMCKVISKLGNDSASANITIVESNEIITGMPASTEGAYVSSESPIRISVSTEGANTSSSTSTSTTGTSHLVKCAEKEKTFCVNGGECFMVKDLSNPSRYLCKCPNEFTGDRCQNYVMASFYKHLGIEFMEAEELYQKRVLTITGICIALLVVGIMCVVAYCKTKKQRKKLHDRLRQSLRSERNNMMNIANGPHHPNPPPENVQLVNQYVSKNVISSEHIVEREAETSFSTSHYTSTAHHSTTVTQTPSHSWSNGHTESILSESHSVIVMSSVENSRHSSPTGGPRGRLNGTGGPRECNSFLRHARETPDSYRDSPHSERYVSAMTTPARMSPVDFHTPSSPKSPPSEMSPPVSSMTVSMPSMAVSPFMEEERPLLLVTPPRLREKKFDHHPQQFSSFHHNPAHDSNSLPASPLRIVEDEEYETTQEYEPAQEPVKKLANSRRAKRTKPNGHIANRLEVDSNTSSQSSNSESETEDERVGEDTPFLGIQNPLAASLEATPAFRLADSRTNPAGRFSTQEEIQARLSSVIANQDPIAV

SEQ ID NO: 155 - DNA, 11080 bp, Homo sapiens
ctacatctacatccaccactgggacaagccatcttgtaaaatgtgcggagaaggagaaaactttctgtgtgaatggaggggagtgcttcatggtgaaagacctttcaaacccctcgagatacttgtgcaagtgcccaaatgagtttactggtgatcgctgccaaaactacgtaatggccagcttctacaagcatcttgggattgaatttatggaggcggaggagctgtaccagaagagagtgctgaccataaccggcatctgcatcgccctccttgtggtcggcatcatgtgtgtggtggcctactgcaaaaccaagaaacagcggaaaaagctgcatgaccgtcttcggcagagccttcggtctgaacgaaacaatatgatgaacattgccaatgggcctcaccatcctaacccaccccccgagaatgtccagctggtgaatcaatacgtatctaaaaacgtcatctccagtgagcatattgttgagagagaagcagagacatccttttccaccagtcactatacttccacagcccatcactccactactgtcacccagactcctagccacagctggagcaacggacacactgaaagcatcctttccgaaagccactctgtaatcgtgatgtcatccgtagaaaacagtaggcacagcagcccaactgggggcccaagaggacgtcttaatggcacaggaggccctcgtgaatgtaacagcttcctcaggcatgccagagaaacccctgattcctaccgagactctcctcatagtgaaaggtatgtgtcagccatgaccaccccggctcgtatgtcacctgtagatttccacacgccaagctcccccaaatcgcccccttcggaaatgtctccacccgtgtccagcatgacggtgtccatgccttccatggcggtcagccccttcatggaagaagagagacctctacttctcgtgacaccaccaaggctgcgggagaagaagtttgaccatcaccctcagcagttcagctccttccaccacaaccccgcgcatgacagtaacagcctccctgctagccccttgaggatagtggaggatgaggagtatgaaacgacccaagagtacgagccagcccaagagcctgttaagaaactcgccaatagccggcgggccaaaagaaccaagcccaatggccacattgctaacagattggaagtggacagcaacacaagctcccagagcagtaactcagagagtgaaacagaagatgaaagagtaggtgaagatacgcctttcctgggcatacagaaccccctggcagccagtcttgaggcaacacctgccttccgcctggctgacagcaggactaacccagcaggccgcttctcgacacaggaagaaatccaggccaggctgtctagtgtaattgctaaccaagaccctattgctgtataaaacctaaataaacacatagattcacctgtaaaactttattttatataataaagtattccaccttaaattaaacaatttattttattttagcagttctgcaaatagaaaacaggaaaaaaacttttataaattaaatatatgtatgtaaaaatgtgttatgtgccatatgtagcaattttttacagtatttcaaaacgagaaagatatcaatggtgcctttatgttatgttatgtcgagagcaagttttgtacagttacagtgattgcttttccacagtatttctgcaaaacctctcatagattcagtttttgctggcttcttgtgcattgcattatgatgttgactggatgtatgatttgcaagacttgcaactgtccctctgtttgcttgtagtagcacccgatcagtatgtcttgtaatggcacatccatccagatatgcctctcttgtgtatgaagttttctttgctttcagaatatgaaatgagttgtgtctactctgccagccaaaggtttgcctcattgggctctgagataatagtagatccaacagcatgctactattaaatacagcaagaaactgcattaagtaatgttaaatattaggaagaaagtaatactgtgatttaaaaaaaactatattattaatcagaagacagcttgctcttactaaaaggagctctcatttactttatttgattttatttttcttgacaaaaagcaacagttttagggatagcttagaaaatgggttctggcttgctatcagggtaaatctaacaccttacaagaggactgagtgtcactttctctctgggggaatgatccagcagcttatctagttgacaatcaaaacacggctgataaaggtgcaatcatttctgacatgtatttttcactgattttgaagctagtgattggttgtgtcttcttggctcaaaaagaagcatattacggcacaaaaagcccagcccagacagcacatgcagcattttgtctgaaatacttctagagtcaaacgtgcctgctgtacatagcgatgacttgtcatcatagggaagtatttccatcgtagagtgttcagaaggagtgactgtataggtggagagaagcttagtgactccgttgaaattttaaaatgtggatgaccacccctttctcccccttatttttcttttatctttccatgttgccttgatcaggtcataactatgcatgaacattttttatcaggaatggccgatgtgtatgtgatttgtaatcacaagtaatgattcatcaggaaatgtcaatcctgttggaaagattgcacctttacttgcagaagtgacccccacctgtgtcctgacctctccatttacaggctctctcacccatttcccccacctcctttaatttttgctttactgtcataaagtaggactaagattggtctaagcattgcatgttcttttgtgatggtaaatccaaaggaaggcctataagtattaacatttgaaataactgctaattcaggaaaatggaagaaaaaaaattatttgaaacacagaacccatttcatggcctgcctgatatctgtgaaatcagggctggagctttacttaggattcacatggcctcctaggaaccatgggacaaatgggaaacaggttatcgggggattcatgaagtcagtgagagtaattgcttcttttttgcgggtgaactgaatgtatttcttcaccaaatcttgatgttaacaattaaaaagaagaaatgacatgcaagtaggtcttagcagaaaaatgcaggctgggcatgagtcatgttgttaccctcccacatgctcctacaatccacagagatgcctgtctgcaggttcttgaagttattgttagtatttggtatctcaaatttttcgtcactgttcacatgccactttctctgtgcacagtggtatcctcatttgctttttaacctacactgaggagtctttgtcaggttgcactgattttccaattctgcagtaatgagtaagctcacggcatggggaagaagacagtcagtccaatgaagttctctaaattattttaacattgcctttgaaggccttgactcatccttagctatttcaatgaagaaattcctaccatgaatttaaaaccctaaaaattctgtttcaaattctttgggcattggggtactcagatatcccattgtggaagaattttaagaataaatagaagtttctgttgagaaccatgagcaacatgtttcttacaatgagaattgctatgcattttaaaattgcaaatatatatgaaaattgaagacaagaggaaattgtatttctaacttgattctgatcactcacagaggtggcatattattatagttgggacatcctttgcacccttcataaaaaaggccagctgactgctcagcatcacctgccaaggccactagatttgtgtttacaggggtatctctgtgatgcttgtcacatcactcttgaccacctctgttaataaattccgacagtgcagtggcgatcggagtgtgaacttatgttcccagcatatggaaagctatcttaggttttaaggtagtagaaattgcccaggagtttgacagcaactttgtttcccgggtctaaaatcgtatcccactgaggtgtatgcagtggagcataatacatgcaaatacatgcaaaactccttttgtttcacctaagattcactttctatcttactttcccttcctgcctagtgtgacttttgcccccaagagtgcctggacagcattctagtttctacaaaatggtcctctgtgtaggtgaatgtgtcccaaacctgctatcactttcttgtttcagtgtgactgtcttgttagaggtgaagtttatccagggtaacttgctcactaactattcctttttatggcctggggttaaagggcgcatggctcacactggtgaaaataaggaaggcctggtcttatcttgtattaataatactggctgcattccaccagccagagatttctatctgcgaagacctatgaaacactgaagagaaatgtaggcagaaggaaatggccacatatcacaagttctattatatattcttttgtaaatacatattgtatattacttggatgttttcttatatcatttactgtctttttgagttaatgtcagtttttactctctcaacttactatgtaacattgtaaataacataatgtcctttattatttatatttaagcatctaacatatagagttgttttcatataagtttaagataaatgtcaaaaatatatgttcttttgtttttctttgctttaaaattatgtatcttttccttttcttttttttaagaataatttattgttcaggagaaagaatgtatatgtaactgaaactatctgaagaatgcacattgaaggccgtgaggtactgataaactaaagaatttattattcaaaatactaagcaataagtaattgtgatttatttaaagttttgtccattttccatgaaagacatactgcaataaaaatgctactctgtggagacctgggagtgttgctcagcagactacagcttcagtctgttagaccagcacctttcatctcattcccatagttatgctaatttaggattgtgttccatggaccccatgatcaccttgtctatacgttgcttcttgtctgtccattgcttttgccacaccacctgttctcaaatcatctcctccctaccaatgctgtttatcactttcttccttgttgaagaggccacacaaccagacagtactatgcttcctttttcctccatacacaataacagagagagaatattctagggcatgactgcctggatcctggctgttgctatcttttgtagtggcagtaagaaactccttcagactaatgaaaatgtcaacgtgccattcaatcacgaaaggtaacgaaaaatgctctcatggttcaaatagtccaatggcccatagtggcctaaaaggcagccagttgacacctggccatgctaagcttccttataccatccgctaatgactttccattgggcccacaatttacggattcataattttaaaagaggagaaggccaagttaggttcattccccttattctgtcaataaaacaaatcaaactcatgtctatctaactgctcagggaggagcctttgcatgagaaaattctcatattctaagactgagtcatagaaatgagggtattacttttcttactgcaattaacctaaacaaaagccatattttaacaaatagatatttgcatggtacccttcatatattccaagcatttcactcattattccaggtaggttaagagcttctgaagtgtatgaagtaaaggtcagcaatcctttggggtgaacagtggcctcctttggagtttgggggtaacctgagacttcccaccaatgtccacctccatctgtgtacctaattcctattacctagttatggctcctctaggatcatttccaaacactctggatgtccaggaaatttaaattgtagcttttgactgagctagtttttcctatttatattaataaattttcaaaaatgcttgaaatcttcacatttgcaacaactttagttttcatgcacatacaaacacagagagacaaaaattccaaacagacactctccaaaagccaccacactctttcacttgctctatagtcatttagccaaccagccatgcagagaatatttaaaacttaaagattgagacattattctcagtttttgctgaggctttgtaacgaaattgaacactataagcagctattgtagtaattttggttaaaattgtttgcctgggatatagtatttgaggcagaagcacgtgtgtgaaggaggtgaggtggtttggaaagagtgaagactcgcagccagattgaatgtctggataattactataattctcccttcttggttgaaaccatgttctctcttgatttttaaacccaggctgcctctggaaacaagcaaacctgagtctttctaacctgagtcttcccaatcattagatttcttttctgtcctaacgatgaatgataaaaggacttgatgttcacaatttggggttataaggcaggtctgaaatctggagactcaagatgctggaaggagtggaaagtttcgatgactttatatgaatcactttgcactctatgtttggcttgtcctctttgaaactgatttactaaaataaatgtaagggaactattactccaaaagattaacttggcaggaaataccaatactttcagtttatgaaagacaaaactgtcttgttgctacaggaagctgcaatgttcctaacctttaaggttggtgttgaatagggtggtcatgccctcccctgcaggtatctttaggctcctgttgacctcctggtactataactgttcgtcttctctgggtagctattgattttgaactttaacatgcttcaaaactttattcatcagggaaataggaaaagagttttgttacctggaggaaatctattgtgatctacctgagctttttaaaaacagaccaggagaaggaaaccagtaatttttaaagaagagacagagaatgggataatagtttcacccaggatctctttctaaccctttcccttcaaatgaacttattggaacagaattggaaagaagaaaggacatctctgcccaccccacaggatgccaaaaaggctaaagaattacctctgtagatttaaacatctttaatggcttatgtatagatttgctaatacagagagaaatgaactattaaataaaaatcacattttataatatttttatggcttaaaacatcctttatctcctttttgttctctctacatgatatggtaagtgatgaggaaaatttaggctcaggaaggttaaaatctttcttggagttacacatctaagagagctgcagagctgacacttgtacccaggttttctgactgcaaatccagtttctttctattgcgttcttcccctttccctgcctcaagcagaaacaggttttttattttcaacctttatgtatacagtatgttatgttacatctacagctaagtttctttttagaagaatgtgagcccttctagctttggtttagagtgattctagaagccaatttccttggcttagtgattctatgcacctttcctaaacttagctttctaaggaaatgaagtgtacgagtgagaatgaattcacaatttcgacatgtaggtagcatcctaaagtgaaaagaggaggaaatttgtggtcaaagcactctccccaccacttagaaacttactgactgtgggcagcttcctcctccaagtttccttcctgatttacaagaccgtggtgtggtcaggattaaacttgaatacatgtaaggaagcctgaaagtgtctaacacatagcgagtattcaaatgccaccttctatttgatccttcccctccagttccttaagttttggaatctaggtttctcagttccaaatggattgacatttgcatatccccattgcacaatggatcaaataaactttatgttatcatttctccaacatagtgccagtaagcaaatcctttttaataacaacagtatgttgagaaacatatcaccaaataatatttaactttgtagctttgataagttctttaggttttggttttggttttgttttctgagacagggtcttgatctgtcacccagactggagtgcaatggttcaattttagctcactgcaacctgtaactcctgagctcaagtgatcctcccacctcagcctctcaagtagctgggactacaggtgtgctccaccatgcccagcgatttttttttttttttttttttttttttttggtagggacaaggtctcgctatgttgcccaggctggtcttcaattcctggccttaagtgatcctcctgcctcggcctcccaaagtgctggaattacaggcatgagccaccacccataactttatgtttgtttttttgatgcagtataagttcagcttgcttcttatgcagccataccatttcatgttaactctgatttttagcagcttattacattagtgttttattattaatataattttacagaaatttactaaaccatgactctgtagagttttaataatactacctccaaacatcattgcaaacatctagaagaatgaacaaaaatgatcttagatcgacagtatatctgtttgtcttagtttctacacaggatgttcagacatattccatttctttaaaaaaaaaatatatatatatatatatatatataggcctggcacggtggctcatgactgtaatcccagcactttgggaggcttaggcaggcaaatcacctgaggtcaggagtttgagactggcctgaccaacatggtgaaacctcgtctctattaaaattacaaaaattagccgggcgtggtggcacatgcctgtaatcccagctactcgggaggctgaggcaggagaatcacttgaacctgggaggcagaggttgcagtgagttgagatcacgccattgcactccagccttggtgacaagagtgaaactccgtctcaaaaaaaaaaaaaatatgtatatatatatatatatatatatatatatatatatatatatatatataaaatcccaccaaaagtctgcagagtgaccaaattagacggctctggtttcagattaaattctaaatgtgagaaaccacatagctcccatgatccatccaataattcctcacgtcctcttcactctttactccatgcataaaacagaatttttttttctcatcctgggtatgaagcaattaataatttacggatttagcctatttggattcaatcccttcaaactccatactacatccaaggtggaagtgacttaaactctgatatcaatcatcaggcttgtaatataggctttgttaatggcaggagagtctaataaaactttctgttccttatccttcatttaaatgaaaaactttttattgaaaacaatcataactctagctcatcataaatataattcatgaggacattttattatttttatattaaagaaataatattatagatgtaaactttgcacctttctaattattatcatgagttaagctaatacttgtcttctggtccctagatgatgattcttttttgccttactggaggagcccttgtcttgaagtgagttgcttcaacagcagaggacttctagtttctcccagttgagcctaaagtgaacttttcatcttcttcagaggaaggggcttccttgatttgtacttttgtggctcctcagataacacagacaattttatcttggatcccaggttctcttcaccattaagaataagaaagagagaaaatgctgtgcatgacagccacctactccaaactacccaaccccctgtaaccaggtaccttccaacaacgagatgattctgccctcactcaagagtctcccccacaaagattccattctccctttactttttattttttatttttttgcaaaacaaaggcctcctttagtacctccttagtttataacccttatcttcccagctcttcccttcactgatacctctgatttcaaaagttctgaagtcggaagaccacacaatttcagactgtgaacagaaattcagtcagaaattattggagttagaaagaatttagagaaattgtattgaactagaaagtcctctttgattagtggtggccctttagaaagttctagggcagagtcccatggtgtttcatcttttccatgatttgcttgaccaaaaacttttctttcacaacatgaaaatatgctaatccaccacacattttggattctgctctgtttgcctgaggtgttagatctctagccaggactgtgaagggaaggaacttgaatccttcctattgagctattaatgcagagtcagtgagatgaagggttccactcggggtcaaaatcatgtcagttaccaagcaaaggagcaagtaaggggaaacatctcctcatctggttagtggagccacatttcacccactgatcaagccagacctgagcaatagtctagatttctccctccacatctaattggtgacaatggtgattgtaccactgacaggtcacacaagtccacaccctccttcacagcctcactgcttcggctcttgtttatgctcttatcagcatctgtcactaggatccatttgtctcctgactcatctacttcctttcactcccctgggccatccttcacatcatgctagaagactgtgtctaacttgcagaacttattgtgtcaatctcctggttacggcccctccatggctccccacctgacataggaggcccttcacaatctggcttctgtcactcataacttgtctccagccttcattcttcagtctgattttatggttttctagttccccaatacaccacaccagtgtttatgaaaccctagtcattggcctacgaactttatgattattgacatattcatgtaccacctgtattattttttgcatagtgtttatttttaattgactacatttttaactacaataaagtaatttcaactaaaa

SEQ ID NO: 156 - protein, 477 aa, Homo sapiens
TSTSTTGTSHLVKCAEKEKTFCVNGGECFMVKDLSNPSRYLCKCPNEFTGDRCQNYVMASFYKHLGIEFMEAEELYQKRVLTITGICIALLVVGIMCVVAYCKTKKQRKKLHDRLRQSLRSERNNMMNIANGPHHPNPPPENVQLVNQYVSKNVISSEHIVEREAETSFSTSHYTSTAHHSTTVTQTPSHSWSNGHTESILSESHSVIVMSSVENSRHSSPTGGPRGRLNGTGGPRECNSFLRHARETPDSYRDSPHSERYVSAMTTPARMSPVDFHTPSSPKSPPSEMSPPVSSMTVSMPSMAVSPFMEEERPLLLVTPPRLREKKFDHHPQQFSSFHHNPAHDSNSLPASPLRIVEDEEYETTQEYEPAQEPVKKLANSRRAKRTKPNGHIANRLEVDSNTSSQSSNSESETEDERVGEDTPFLGIQNPLAASLEATPAFRLADSRTNPAGRFSTQEEIQARLSSVIANQDPIAV

SEQ ID NO: 157 - DNA, 11083 bp, Homo sapiens
catctacatctacatccaccactgggacaagccatcttgtaaaatgtgcggagaaggagaaaactttctgtgtgaatggaggggagtgcttcatggtgaaagacctttcaaacccctcgagatacttgtgcaagtgcccaaatgagtttactggtgatcgctgccaaaactacgtaatggccagcttctacaagcatcttgggattgaatttatggaggcggaggagctgtaccagaagagagtgctgaccataaccggcatctgcatcgccctccttgtggtcggcatcatgtgtgtggtggcctactgcaaaaccaagaaacagcggaaaaagctgcatgaccgtcttcggcagagccttcggtctgaacgaaacaatatgatgaacattgccaatgggcctcaccatcctaacccaccccccgagaatgtccagctggtgaatcaatacgtatctaaaaacgtcatctccagtgagcatattgttgagagagaagcagagacatccttttccaccagtcactatacttccacagcccatcactccactactgtcacccagactcctagccacagctggagcaacggacacactgaaagcatcctttccgaaagccactctgtaatcgtgatgtcatccgtagaaaacagtaggcacagcagcccaactgggggcccaagaggacgtcttaatggcacaggaggccctcgtgaatgtaacagcttcctcaggcatgccagagaaacccctgattcctaccgagactctcctcatagtgaaaggtatgtgtcagccatgaccaccccggctcgtatgtcacctgtagatttccacacgccaagctcccccaaatcgcccccttcggaaatgtctccacccgtgtccagcatgacggtgtccatgccttccatggcggtcagccccttcatggaagaagagagacctctacttctcgtgacaccaccaaggctgcgggagaagaagtttgaccatcaccctcagcagttcagctccttccaccacaaccccgcgcatgacagtaacagcctccctgctagccccttgaggatagtggaggatgaggagtatgaaacgacccaagagtacgagccagcccaagagcctgttaagaaactcgccaatagccggcgggccaaaagaaccaagcccaatggccacattgctaacagattggaagtggacagcaacacaagctcccagagcagtaactcagagagtgaaacagaagatgaaagagtaggtgaagatacgcctttcctgggcatacagaaccccctggcagccagtcttgaggcaacacctgccttccgcctggctgacagcaggactaacccagcaggccgcttctcgacacaggaagaaatccaggccaggctgtctagtgtaattgctaaccaagaccctattgctgtataaaacctaaataaacacatagattcacctgtaaaactttattttatataataaagtattccaccttaaattaaacaatttattttattttagcagttctgcaaatagaaaacaggaaaaaaacttttataaattaaatatatgtatgtaaaaatgtgttatgtgccatatgtagcaattttttacagtatttcaaaacgagaaagatatcaatggtgcctttatgttatgttatgtcgagagcaagttttgtacagttacagtgattgcttttccacagtatttctgcaaaacctctcatagattcagtttttgctggcttcttgtgcattgcattatgatgttgactggatgtatgatttgcaagacttgcaactgtccctctgtttgcttgtagtagcacccgatcagtatgtcttgtaatggcacatccatccagatatgcctctcttgtgtatgaagttttctttgctttcagaatatgaaatgagttgtgtctactctgccagccaaaggtttgcctcattgggctctgagataatagtagatccaacagcatgctactattaaatacagcaagaaactgcattaagtaatgttaaatattaggaagaaagtaatactgtgatttaaaaaaaactatattattaatcagaagacagcttgctcttactaaaaggagctctcatttactttatttgattttatttttcttgacaaaaagcaacagttttagggatagcttagaaaatgggttctggcttgctatcagggtaaatctaacaccttacaagaggactgagtgtcactttctctctgggggaatgatccagcagcttatctagttgacaatcaaaacacggctgataaaggtgcaatcatttctgacatgtatttttcactgattttgaagctagtgattggttgtgtcttcttggctcaaaaagaagcatattacggcacaaaaagcccagcccagacagcacatgcagcattttgtctgaaatacttctagagtcaaacgtgcctgctgtacatagcgatgacttgtcatcatagggaagtatttccatcgtagagtgttcagaaggagtgactgtataggtggagagaagcttagtgactccgttgaaattttaaaatgtggatgaccacccctttctcccccttatttttcttttatctttccatgttgccttgatcaggtcataactatgcatgaacattttttatcaggaatggccgatgtgtatgtgatttgtaatcacaagtaatgattcatcaggaaatgtcaatcctgttggaaagattgcacctttacttgcagaagtgacccccacctgtgtcctgacctctccatttacaggctctctcacccatttcccccacctcctttaatttttgctttactgtcataaagtaggactaagattggtctaagcattgcatgttcttttgtgatggtaaatccaaaggaaggcctataagtattaacatttgaaataactgctaattcaggaaaatggaagaaaaaaaattatttgaaacacagaacccatttcatggcctgcctgatatctgtgaaatcagggctggagctttacttaggattcacatggcctcctaggaaccatgggacaaatgggaaacaggttatcgggggattcatgaagtcagtgagagtaattgcttcttttttgcgggtgaactgaatgtatttcttcaccaaatcttgatgttaacaattaaaaagaagaaatgacatgcaagtaggtcttagcagaaaaatgcaggctgggcatgagtcatgttgttaccctcccacatgctcctacaatccacagagatgcctgtctgcaggttcttgaagttattgttagtatttggtatctcaaatttttcgtcactgttcacatgccactttctctgtgcacagtggtatcctcatttgctttttaacctacactgaggagtctttgtcaggttgcactgattttccaattctgcagtaatgagtaagctcacggcatggggaagaagacagtcagtccaatgaagttctctaaattattttaacattgcctttgaaggccttgactcatccttagctatttcaatgaagaaattcctaccatgaatttaaaaccctaaaaattctgtttcaaattctttgggcattggggtactcagatatcccattgtggaagaattttaagaataaatagaagtttctgttgagaaccatgagcaacatgtttcttacaatgagaattgctatgcattttaaaattgcaaatatatatgaaaattgaagacaagaggaaattgtatttctaacttgattctgatcactcacagaggtggcatattattatagttgggacatcctttgcacccttcataaaaaaggccagctgactgctcagcatcacctgccaaggccactagatttgtgtttacaggggtatctctgtgatgcttgtcacatcactcttgaccacctctgttaataaattccgacagtgcagtggcgatcggagtgtgaacttatgttcccagcatatggaaagctatcttaggttttaaggtagtagaaattgcccaggagtttgacagcaactttgtttcccgggtctaaaatcgtatcccactgaggtgtatgcagtggagcataatacatgcaaatacatgcaaaactccttttgtttcacctaagattcactttctatcttactttcccttcctgcctagtgtgacttttgcccccaagagtgcctggacagcattctagtttctacaaaatggtcctctgtgtaggtgaatgtgtcccaaacctgctatcactttcttgtttcagtgtgactgtcttgttagaggtgaagtttatccagggtaacttgctcactaactattcctttttatggcctggggttaaagggcgcatggctcacactggtgaaaataaggaaggcctggtcttatcttgtattaataatactggctgcattccaccagccagagatttctatctgcgaagacctatgaaacactgaagagaaatgtaggcagaaggaaatggccacatatcacaagttctattatatattcttttgtaaatacatattgtatattacttggatgttttcttatatcatttactgtctttttgagttaatgtcagtttttactctctcaacttactatgtaacattgtaaataacataatgtcctttattatttatatttaagcatctaacatatagagttgttttcatataagtttaagataaatgtcaaaaatatatgttcttttgtttttctttgctttaaaattatgtatcttttccttttcttttttttaagaataatttattgttcaggagaaagaatgtatatgtaactgaaactatctgaagaatgcacattgaaggccgtgaggtactgataaactaaagaatttattattcaaaatactaagcaataagtaattgtgatttatttaaagttttgtccattttccatgaaagacatactgcaataaaaatgctactctgtggagacctgggagtgttgctcagcagactacagcttcagtctgttagaccagcacctttcatctcattcccatagttatgctaatttaggattgtgttccatggaccccatgatcaccttgtctatacgttgcttcttgtctgtccattgcttttgccacaccacctgttctcaaatcatctcctccctaccaatgctgtttatcactttcttccttgttgaagaggccacacaaccagacagtactatgcttcctttttcctccatacacaataacagagagagaatattctagggcatgactgcctggatcctggctgttgctatcttttgtagtggcagtaagaaactccttcagactaatgaaaatgtcaacgtgccattcaatcacgaaaggtaacgaaaaatgctctcatggttcaaatagtccaatggcccatagtggcctaaaaggcagccagttgacacctggccatgctaagcttccttataccatccgctaatgactttccattgggcccacaatttacggattcataattttaaaagaggagaaggccaagttaggttcattccccttattctgtcaataaaacaaatcaaactcatgtctatctaactgctcagggaggagcctttgcatgagaaaattctcatattctaagactgagtcatagaaatgagggtattacttttcttactgcaattaacctaaacaaaagccatattttaacaaatagatatttgcatggtacccttcatatattccaagcatttcactcattattccaggtaggttaagagcttctgaagtgtatgaagtaaaggtcagcaatcctttggggtgaacagtggcctcctttggagtttgggggtaacctgagacttcccaccaatgtccacctccatctgtgtacctaattcctattacctagttatggctcctctaggatcatttccaaacactctggatgtccaggaaatttaaattgtagcttttgactgagctagtttttcctatttatattaataaattttcaaaaatgcttgaaatcttcacatttgcaacaactttagttttcatgcacatacaaacacagagagacaaaaattccaaacagacactctccaaaagccaccacactctttcacttgctctatagtcatttagccaaccagccatgcagagaatatttaaaacttaaagattgagacattattctcagtttttgctgaggctttgtaacgaaattgaacactataagcagctattgtagtaattttggttaaaattgtttgcctgggatatagtatttgaggcagaagcacgtgtgtgaaggaggtgaggtggtttggaaagagtgaagactcgcagccagattgaatgtctggataattactataattctcccttcttggttgaaaccatgttctctcttgatttttaaacccaggctgcctctggaaacaagcaaacctgagtctttctaacctgagtcttcccaatcattagatttcttttctgtcctaacgatgaatgataaaaggacttgatgttcacaatttggggttataaggcaggtctgaaatctggagactcaagatgctggaaggagtggaaagtttcgatgactttatatgaatcactttgcactctatgtttggcttgtcctctttgaaactgatttactaaaataaatgtaagggaactattactccaaaagattaacttggcaggaaataccaatactttcagtttatgaaagacaaaactgtcttgttgctacaggaagctgcaatgttcctaacctttaaggttggtgttgaatagggtggtcatgccctcccctgcaggtatctttaggctcctgttgacctcctggtactataactgttcgtcttctctgggtagctattgattttgaactttaacatgcttcaaaactttattcatcagggaaataggaaaagagttttgttacctggaggaaatctattgtgatctacctgagctttttaaaaacagaccaggagaaggaaaccagtaatttttaaagaagagacagagaatgggataatagtttcacccaggatctctttctaaccctttcccttcaaatgaacttattggaacagaattggaaagaagaaaggacatctctgcccaccccacaggatgccaaaaaggctaaagaattacctctgtagatttaaacatctttaatggcttatgtatagatttgctaatacagagagaaatgaactattaaataaaaatcacattttataatatttttatggcttaaaacatcctttatctcctttttgttctctctacatgatatggtaagtgatgaggaaaatttaggctcaggaaggttaaaatctttcttggagttacacatctaagagagctgcagagctgacacttgtacccaggttttctgactgcaaatccagtttctttctattgcgttcttcccctttccctgcctcaagcagaaacaggttttttattttcaacctttatgtatacagtatgttatgttacatctacagctaagtttctttttagaagaatgtgagcccttctagctttggtttagagtgattctagaagccaatttccttggcttagtgattctatgcacctttcctaaacttagctttctaaggaaatgaagtgtacgagtgagaatgaattcacaatttcgacatgtaggtagcatcctaaagtgaaaagaggaggaaatttgtggtcaaagcactctccccaccacttagaaacttactgactgtgggcagcttcctcctccaagtttccttcctgatttacaagaccgtggtgtggtcaggattaaacttgaatacatgtaaggaagcctgaaagtgtctaacacatagcgagtattcaaatgccaccttctatttgatccttcccctccagttccttaagttttggaatctaggtttctcagttccaaatggattgacatttgcatatccccattgcacaatggatcaaataaactttatgttatcatttctccaacatagtgccagtaagcaaatcctttttaataacaacagtatgttgagaaacatatcaccaaataatatttaactttgtagctttgataagttctttaggttttggttttggttttgttttctgagacagggtcttgatctgtcacccagactggagtgcaatggttcaattttagctcactgcaacctgtaactcctgagctcaagtgatcctcccacctcagcctctcaagtagctgggactacaggtgtgctccaccatgcccagcgatttttttttttttttttttttttttttttggtagggacaaggtctcgctatgttgcccaggctggtcttcaattcctggccttaagtgatcctcctgcctcggcctcccaaagtgctggaattacaggcatgagccaccacccataactttatgtttgtttttttgatgcagtataagttcagcttgcttcttatgcagccataccatttcatgttaactctgatttttagcagcttattacattagtgttttattattaatataattttacagaaatttactaaaccatgactctgtagagttttaataatactacctccaaacatcattgcaaacatctagaagaatgaacaaaaatgatcttagatcgacagtatatctgtttgtcttagtttctacacaggatgttcagacatattccatttctttaaaaaaaaaatatatatatatatatatatatataggcctggcacggtggctcatgactgtaatcccagcactttgggaggcttaggcaggcaaatcacctgaggtcaggagtttgagactggcctgaccaacatggtgaaacctcgtctctattaaaattacaaaaattagccgggcgtggtggcacatgcctgtaatcccagctactcgggaggctgaggcaggagaatcacttgaacctgggaggcagaggttgcagtgagttgagatcacgccattgcactccagccttggtgacaagagtgaaactccgtctcaaaaaaaaaaaaaatatgtatatatatatatatatatatatatatatatatatatatatatatataaaatcccaccaaaagtctgcagagtgaccaaattagacggctctggtttcagattaaattctaaatgtgagaaaccacatagctcccatgatccatccaataattcctcacgtcctcttcactctttactccatgcataaaacagaatttttttttctcatcctgggtatgaagcaattaataatttacggatttagcctatttggattcaatcccttcaaactccatactacatccaaggtggaagtgacttaaactctgatatcaatcatcaggcttgtaatataggctttgttaatggcaggagagtctaataaaactttctgttccttatccttcatttaaatgaaaaactttttattgaaaacaatcataactctagctcatcataaatataattcatgaggacattttattatttttatattaaagaaataatattatagatgtaaactttgcacctttctaattattatcatgagttaagctaatacttgtcttctggtccctagatgatgattcttttttgccttactggaggagcccttgtcttgaagtgagttgcttcaacagcagaggacttctagtttctcccagttgagcctaaagtgaacttttcatcttcttcagaggaaggggcttccttgatttgtacttttgtggctcctcagataacacagacaattttatcttggatcccaggttctcttcaccattaagaataagaaagagagaaaatgctgtgcatgacagccacctactccaaactacccaaccccctgtaaccaggtaccttccaacaacgagatgattctgccctcactcaagagtctcccccacaaagattccattctccctttactttttattttttatttttttgcaaaacaaaggcctcctttagtacctccttagtttataacccttatcttcccagctcttcccttcactgatacctctgatttcaaaagttctgaagtcggaagaccacacaatttcagactgtgaacagaaattcagtcagaaattattggagttagaaagaatttagagaaattgtattgaactagaaagtcctctttgattagtggtggccctttagaaagttctagggcagagtcccatggtgtttcatcttttccatgatttgcttgaccaaaaacttttctttcacaacatgaaaatatgctaatccaccacacattttggattctgctctgtttgcctgaggtgttagatctctagccaggactgtgaagggaaggaacttgaatccttcctattgagctattaatgcagagtcagtgagatgaagggttccactcggggtcaaaatcatgtcagttaccaagcaaaggagcaagtaaggggaaacatctcctcatctggttagtggagccacatttcacccactgatcaagccagacctgagcaatagtctagatttctccctccacatctaattggtgacaatggtgattgtaccactgacaggtcacacaagtccacaccctccttcacagcctcactgcttcggctcttgtttatgctcttatcagcatctgtcactaggatccatttgtctcctgactcatctacttcctttcactcccctgggccatccttcacatcatgctagaagactgtgtctaacttgcagaacttattgtgtcaatctcctggttacggcccctccatggctccccacctgacataggaggcccttcacaatctggcttctgtcactcataacttgtctccagccttcattcttcagtctgattttatggttttctagttccccaatacaccacaccagtgtttatgaaaccctagtcattggcctacgaactttatgattattgacatattcatgtaccacctgtattattttttgcatagtgtttatttttaattgactacatttttaactacaataaagtaatttcaactaaaa

SEQ ID NO: 158 - protein, 478 aa, Homo sapiens
STSTSTTGTSHLVKCAEKEKTFCVNGGECFMVKDLSNPSRYLCKCPNEFTGDRCQNYVMASFYKHLGIEFMEAEELYQKRVLTITGICIALLVVGIMCVVAYCKTKKQRKKLHDRLRQSLRSERNNMMNIANGPHHPNPPPENVQLVNQYVSKNVISSEHIVEREAETSFSTSHYTSTAHHSTTVTQTPSHSWSNGHTESILSESHSVIVMSSVENSRHSSPTGGPRGRLNGTGGPRECNSFLRHARETPDSYRDSPHSERYVSAMTTPARMSPVDFHTPSSPKSPPSEMSPPVSSMTVSMPSMAVSPFMEEERPLLLVTPPRLREKKFDHHPQQFSSFHHNPAHDSNSLPASPLRIVEDEEYETTQEYEPAQEPVKKLANSRRAKRTKPNGHIANRLEVDSNTSSQSSNSESETEDERVGEDTPFLGIQNPLAASLEATPAFRLADSRTNPAGRFSTQEEIQARLSSVIANQDPIAV

SEQ ID NO: 159-160 - skipped (2 entries)

SEQ ID NO: 161 - DNA, 586 bp, Homo sapiens
agtaagcctccgcagcccactcggactgcagcctgtttgccgcccgtcctcccattgcagcactcggggcgacagagagggaggaggcgcgcggggacggggacgcccaggaggacccactcgcgggtcccgctccgctccggcagcagcatggggaaaggacgcgcgggccgagttggcaccacagccttgcctccccgattgaaagagatgaaaagccaggaatcggctgcaggttccaaactagtccttcggtgtgaaaccagttctgaatactcctctctcagattcaagtggttcaagaatgggaatgaattgaatcgaaaaaacaaaccacaaaatatcaagatacaaaaaaagccagggaagtcagaacttcgcattaacaaagcatcactggctgattctggagagtatatgtgcaaagtgatcagcaaattaggaaatgacagtgcctctgccaatatcaccatcgtggaatcaaacgagatcatcactggtatgccagcctcaactgaaggagcatatgtgtcttcagagtctcccattagaatatcagtatccacagaaggagcaaatacttctt

SEQ ID NO: 162 - protein, 145 aa, Homo sapiens
MGKGRAGRVGTTALPPRLKEMKSQESAAGSKLVLRCETSSEYSSLRFKWFKNGNELNRKNKPQNIKIQKKPGKSELRINKASLADSGEYMCKVISKLGNDSASANITIVESNEIITGMPASTEGAYVSSESPIRISVSTEGANTS

SEQ ID NO: 163 - protein, 52 aa, Homo sapiens
HLVKCAEKEKTFCVNGGECFMVKDLSNPSRYLCKCPNEFTGDRCQNYVMASF

SEQ ID NO: 164 - DNA, 65 bp, Homo sapiens
cataattagcatcatcattattctggctggagcaattgcactcatcattggctttggtatttcag

SEQ ID NO: 165 - DNA, 28 bp, Homo sapiens
ccttgcctccccgattgaaagagatgaa

SEQ ID NO: 166 - DNA, 93 bp, Homo sapiens
cataattagcatcatcattattctggctggagcaattgcactcatcattggctttggtatttcagccttgcctccccgattgaaagagatgaa

SEQ ID NO: 167 - protein, 30 aa, Homo sapiens
IISIIIILAGAIALIIGFGISALPPRLKEM

SEQ ID NO: 168 - DNA, 104 bp, Homo sapiens
gtgagtcaccaaggaaggcagcggcagctccactcagccagtacccagatacgctgggaaccttccccagccatggcttccctggggcagatcctcttctggag

SEQ ID NO: 169 - DNA, 65 bp, Homo sapiens; identical to SEQ ID NO: 164

SEQ ID NO: 170 - DNA, 348 bp, Homo sapiens
ggagacactccatcacagtcactactgtcgcctcagctgggaacattggggaggatggaatcctgagctgcacttttgaacctgacatcaaactttctgatatcgtgatacaatggctgaaggaaggtgttttaggcttggtccatgagttcaaagaaggcaaagatgagctgtcggagcaggatgaaatgttcagaggccggacagcagtgtttgctgatcaagtgatagttggcaatgcctctttgcggctgaaaaacgtgcaactcacagatgctggcacctacaaatgttatatcatcacttctaaaggcaaggggaatgctaaccttgagtataaaactggag

SEQ ID NO: 171 - DNA, 279 bp, Homo sapiens
ccttcagcatgccggaagtgaatgtggactataatgccagctcagagaccttgcggtgtgaggctccccgatggttcccccagcccacagtggtctgggcatcccaagttgaccagggagccaacttctcggaagtctccaataccagctttgagctgaactctgagaatgtgaccatgaaggttgtgtctgtgctctacaatgttacgatcaacaacacatactcctgtatgattgaaaatgacattgccaaagcaacaggggatatcaaagtgacag

SEQ ID NO: 172 - DNA, 170 bp, Homo sapiens
aatcggagatcaaaaggcggagtcacctacagctgctaaactcaaaggcttctctgtgtgtctcttctttctttgccatcagctgggcacttctgcctctcagcccttacctgatgctaaaataatgtgcctcggccacaaaaaagcatgcaaagtcattgttacaacag

SEQ ID NO: 173 - DNA, 1639 bp, Homo sapiens
ggatctacagaactatttcaccaccagatatgacctagttttatatttctgggaggaaatgaattcatatctagaagtctggagtgagcaaacaagagcaagaaacaaaaagaagccaaaagcagaaggctccaatatgaacaagataaatctatcttcaaagacatattagaagttgggaaaataattcatgtgaactagacaagtgtgttaagagtgataagtaaaatgcacgtggagacaagtgcatccccagatctcagggacctccccctgcctgtcacctggggagtgagaggacaggatagtgcatgttctttgtctctgaatttttagttatatgtgctgtaatgttgctctgaggaagcccctggaaagtctatcccaacatatccacatcttatattccacaaattaagctgtagtatgtaccctaagacgctgctaattgactgccacttcgcaactcaggggcggctgcattttagtaatgggtcaaatgattcactttttatgatgcttccaaaggtgccttggcttctcttcccaactgacaaatgccaaagttgagaaaaatgatcataattttagcataaacagagcagtcggcgacaccgattttataaataaactgagcaccttctttttaaacaaacaaatgcgggtttatttctcagatgatgttcatccgtgaatggtccagggaaggacctttcaccttgtctatatggcattatgtcatcacaagctctgaggcttctcctttccatcctgcgtggacagctaagacctcagttttcaatagcatctagagcagtgggactcagctggggtgatttcgccccccatctccgggggaatgtctgaagacaattttggttacctcaatgagggagtggaggaggatacagtgctactaccaactagtggatagaggccagggatgctgctcaacctcctaccatgtacaggacgtctccccattacaactacccaatccgaagtgtcaactgtgtcagggctaagaaaccctggttttgagtagaaaagggcctggaaagaggggagccaacaaatctgtctgcttcctcacattagtcattggcaaataagcattctgtctctttggctgctgcctcagcacagagagccagaactctatcgggcaccaggataacatctctcagtgaacagagttgacaaggcctatgggaaatgcctgatgggattatcttcagcttgttgagcttctaagtttctttcccttcattctaccctgcaagccaagttctgtaagagaaatgcctgagttctagctcaggttttcttactctgaatttagatctccagaccctgcctggccacaattcaaattaaggcaacaaacatataccttccatgaagcacacacagacttttgaaagcaaggacaatgactgcttgaattgaggccttgaggaatgaagctttgaaggaaaagaatactttgtttccagcccccttcccacactcttcatgtgttaaccactgccttcctggaccttggagccacggtgactgtattacatgttgttatagaaaactgattttagagttctgatcgttcaagagaatgattaaatatacatttcctacacca

SEQ ID NO: 174 - DNA, 2605 bp, Homo sapiens
gtgagtcaccaaggaaggcagcggcagctccactcagccagtacccagatacgctgggaaccttccccagccatggcttccctggggcagatcctcttctggagcataattagcatcatcattattctggctggagcaattgcactcatcattggctttggtatttcagggagacactccatcacagtcactactgtcgcctcagctgggaacattggggaggatggaatcctgagctgcacttttgaacctgacatcaaactttctgatatcgtgatacaatggctgaaggaaggtgttttaggcttggtccatgagttcaaagaaggcaaagatgagctgtcggagcaggatgaaatgttcagaggccggacagcagtgtttgctgatcaagtgatagttggcaatgcctctttgcggctgaaaaacgtgcaactcacagatgctggcacctacaaatgttatatcatcacttctaaaggcaaggggaatgctaaccttgagtataaaactggagccttcagcatgccggaagtgaatgtggactataatgccagctcagagaccttgcggtgtgaggctccccgatggttcccccagcccacagtggtctgggcatcccaagttgaccagggagccaacttctcggaagtctccaataccagctttgagctgaactctgagaatgtgaccatgaaggttgtgtctgtgctctacaatgttacgatcaacaacacatactcctgtatgattgaaaatgacattgccaaagcaacaggggatatcaaagtgacagaatcggagatcaaaaggcggagtcacctacagctgctaaactcaaaggcttctctgtgtgtctcttctttctttgccatcagctgggcacttctgcctctcagcccttacctgatgctaaaataatgtgcctcggccacaaaaaagcatgcaaagtcattgttacaacagggatctacagaactatttcaccaccagatatgacctagttttatatttctgggaggaaatgaattcatatctagaagtctggagtgagcaaacaagagcaagaaacaaaaagaagccaaaagcagaaggctccaatatgaacaagataaatctatcttcaaagacatattagaagttgggaaaataattcatgtgaactagacaagtgtgttaagagtgataagtaaaatgcacgtggagacaagtgcatccccagatctcagggacctccccctgcctgtcacctggggagtgagaggacaggatagtgcatgttctttgtctctgaatttttagttatatgtgctgtaatgttgctctgaggaagcccctggaaagtctatcccaacatatccacatcttatattccacaaattaagctgtagtatgtaccctaagacgctgctaattgactgccacttcgcaactcaggggcggctgcattttagtaatgggtcaaatgattcactttttatgatgcttccaaaggtgccttggcttctcttcccaactgacaaatgccaaagttgagaaaaatgatcataattttagcataaacagagcagtcggcgacaccgattttataaataaactgagcaccttctttttaaacaaacaaatgcgggtttatttctcagatgatgttcatccgtgaatggtccagggaaggacctttcaccttgtctatatggcattatgtcatcacaagctctgaggcttctcctttccatcctgcgtggacagctaagacctcagttttcaatagcatctagagcagtgggactcagctggggtgatttcgccccccatctccgggggaatgtctgaagacaattttggttacctcaatgagggagtggaggaggatacagtgctactaccaactagtggatagaggccagggatgctgctcaacctcctaccatgtacaggacgtctccccattacaactacccaatccgaagtgtcaactgtgtcagggctaagaaaccctggttttgagtagaaaagggcctggaaagaggggagccaacaaatctgtctgcttcctcacattagtcattggcaaataagcattctgtctctttggctgctgcctcagcacagagagccagaactctatcgggcaccaggataacatctctcagtgaacagagttgacaaggcctatgggaaatgcctgatgggattatcttcagcttgttgagcttctaagtttctttcccttcattctaccctgcaagccaagttctgtaagagaaatgcctgagttctagctcaggttttcttactctgaatttagatctccagaccctgcctggccacaattcaaattaaggcaacaaacatataccttccatgaagcacacacagacttttgaaagcaaggacaatgactgcttgaattgaggccttgaggaatgaagctttgaaggaaaagaatactttgtttccagcccccttcccacactcttcatgtgttaaccactgccttcctggaccttggagccacggtgactgtattacatgttgttatagaaaactgattttagagttctgatcgttcaagagaatgattaaatatacatttcctacacca

SEQ ID NO: 175 - protein, 10 aa, Homo sapiens
MASLGQILFW

SEQ ID NO: 176 - protein, 21 aa, Homo sapiens
IISIIIILAGAIALIIGFGIS

SEQ ID NO: 177 - protein, 115 aa, Homo sapiens
RHSITVTTVASAGNIGEDGILSCTFEPDIKLSDIVIQWLKEGVLGLVHEFKEGKDELSEQDEMFRGRTAVFADQVIVGNASLRLKNVQLTDAGTYKCYIITSKGKGNANLEYKTG

SEQ ID NO: 178 - protein, 92 aa, Homo sapiens
FSMPEVNVDYNASSETLRCEAPRWFPQPTVVWASQVDQGANFSEVSNTSFELNSENVTMKVVSVLYNVTINNTYSCMIENDIAKATGDIKVT

SEQ ID NO: 179 - protein, 40 aa, Homo sapiens
SEIKRRSHLQLLNSKASLCVSSFFAISWALLPLSPYLMLK

SEQ ID NO: 180 - protein, 282 aa, Homo sapiens
MASLGQILFWSIISIIIILAGAIALIIGFGISGRHSITVTTVASAGNIGEDGILSCTFEPDIKLSDIVIQWLKEGVLGLVHEFKEGKDELSEQDEMFRGRTAVFADQVIVGNASLRLKNVQLTDAGTYKCYIITSKGKGNANLEYKTGAFSMPEVNVDYNASSETLRCEAPRWFPQPTVVWASQVDQGANFSEVSNTSFELNSENVTMKVVSVLYNVTINNTYSCMIENDIAKATGDIKVTESEIKRRSHLQLLNSKASLCVSSFFAISWALLPLSPYLMLK

SEQ ID NO: 181 - DNA, 169 bp, Homo sapiens
gtgagtcaccaaggaaggcagcggcagctccactcagccagtacccagatacgctgggaaccttccccagccatggcttccctggggcagatcctcttctggagcataattagcatcatcattattctggctggagcaattgcactcatcattggctttggtatttcag

SEQ ID NO: 182 - protein, 32 aa, Homo sapiens
MASLGQILFWSIISIIIILAGAIALIIGFGIS

SEQ ID NO: 183 - skipped

SEQ ID NO: 184 - DNA, 119 bp, Homo sapiens
ctggctggagattaatccggacactggtgccatttccactcgggctgagctggacagggaggattttgagcacgtgaagaacagcacgtacacagccctaatcatagctacagacaatg

SEQ ID NO: 185 - DNA, 30 bp, Homo sapiens
ccttgcctccccgattgaaagagatgaaaa

SEQ ID NO: 186 - DNA, 148 bp, Homo sapiens
ctggctggagattaatccggacactggtgccatttccactcgggctgagctggacagggaggattttgagcacgtgaagaacagcacgtacacagccctaatcatagctacagacaatgccttgcctccccgattgaaagagatgaaa

SEQ ID NO: 187 - protein, 49 aa, Homo sapiens
WLEINPDTGAISTRAELDREDFEHVKNSTYTALIIATDNALPPRLKEMK

SEQ ID NO: 188 - DNA, 172 bp, Homo sapiens
agtggcgtcggaactgcaaagcacctgtgagcttgcggaagtcagttcagactccagcccgctccagcccggcccgacccgaccgcacccggcgcctgccctcgctcggcgtccccggccagccatgggcccttggagccgcagcctctcggcgctgctgctgctgctgcag

SEQ ID NO: 189 - DNA, 115 bp, Homo sapiens
gtctcctcttggctctgccaggagccggagccctgccaccctggctttgacgccgagagctacacgttcacggtgccccggcgccacctggagagaggccgcgtcctgggcagag

SEQ ID NO: 190 - DNA, 224 bp, Homo sapiens
tgaattttgaagattgcaccggtcgacaaaggacagcctatttttccctcgacacccgattcaaagtgggcacagatggtgtgattacagtcaaaaggcctctacggtttcataacccacagatccatttcttggtctacgcctgggactccacctacagaaagttttccaccaaagtcacgctgaatacagtggggcaccaccaccgccccccgccccatcag

SEQ ID NO: 191 - DNA, 144 bp, Homo sapiens
gcctccgtttctggaatccaagcagaattgctcacatttcccaactcctctcctggcctcagaagacagaagagagactgggttattcctcccatcagctgcccagaaaatgaaaaaggcccatttcctaaaaacctggttcag

SEQ ID NO: 192 - DNA, 156 bp, Homo sapiens
atcaaatccaacaaagacaaagaaggcaaggttttctacagcatcactggccaaggagctgacacaccccctgttggtgtctttattattgaaagagaaacaggatggctgaaggtgacagagcctctggatagagaacgcattgccacatacact

SEQ ID NO: 193 - DNA, 145 bp, Homo sapiens
ctcttctctcacgctgtgtcatccaacgggaatgcagttgaggatccaatggagattttgatcacggtaaccgatcagaatgacaacaagcccgaattcacccaggaggtctttaaggggtctgtcatggaaggtgctcttccag

SEQ ID NO: 194 - DNA, 176 bp, Homo sapiens
gaacctctgtgatggaggtcacagccacagacgcggacgatgatgtgaacacctacaatgccgccatcgcttacaccatcctcagccaagatcctgagctccctgacaaaaatatgttcaccattaacaggaacacaggagtcatcagtgtggtcaccactgggctggaccgagag

SEQ ID NO: 195 - DNA, 129 bp, Homo sapiens
agtttccctacgtataccctggtggttcaagctgctgaccttcaaggtgaggggttaagcacaacagcaacagctgtgatcacagtcactgacaccaacgataatcctccgatcttcaatcccaccacg

SEQ ID NO: 196 - DNA, 250 bp, Homo sapiens
tacaagggtcaggtgcctgagaacgaggctaacgtcgtaatcaccacactgaaagtgactgatgctgatgcccccaataccccagcgtgggaggctgtatacaccatattgaatgatgatggtggacaatttgtcgtcaccacaaatccagtgaacaacgatggcattttgaaaacagcaaaggtttgtatggtacctggcaagatgcagaaactggcatcctcacagctgttcatacccttgtcccctg

SEQ ID NO: 197 - DNA, 245 bp, Homo sapiens
ggcttggattttgaggccaagcagcagtacattctacacgtagcagtgacgaatgtggtaccttttgaggtctctctcaccacctccacagccaccgtcaccgtggatgtgctggatgtgaatgaagcccccatctttgtgcctcctgaaaagagagtggaagtgtccgaggactttggcgtgggccaggaaatcacatcctacactgcccaggagccagacacatttatggaacagaaaataac

SEQ ID NO: 198 - DNA, 146 bp, Homo sapiens
atatcggatttggagagacactgccaactggctggagattaatccggacactggtgccatttccactcgggctgagctggacagggaggattttgagcacgtgaagaacagcacgtacacagccctaatcatagctacagacaatg

SEQ ID NO: 199 - DNA, 225 bp, Homo sapiens
gttctccagttgctactggaacagggacacttctgctgatcctgtctgatgtgaatgacaacgcccccataccagaacctcgaactatattcttctgtgagaggaatccaaagcctcaggtcataaacatcattgatgcagaccttcctcccaatacatctcccttcacagcagaactaacacacggggcgagtgccaactggaccattcagtacaacgacccaa

SEQ ID NO: 200 - DNA, 228 bp, Homo sapiens
cccaagaatctatcattttgaagccaaagatggccttagaggtgggtgactacaaaatcaatctcaagctcatggataaccagaataaagaccaagtgaccaccttagaggtcagcgtgtgtgactgtgaaggggccgctggcgtctgtaggaaggcacagcctgtcgaagcaggattgcaaattcctgccattctggggattcttggaggaattcttgctttgctaa

SEQ ID NO: 201 - DNA, 131 bp, Homo sapiens
ttctgattctgctgctcttgctgtttcttcggaggagagcggtggtcaaagagcccttactgcccccagaggatgacacccgggacaacgtttattactatgatgaagaaggaggcggagaagaggaccag

SEQ ID NO: 202 - DNA, 144 bp, Homo sapiens
gactttgacttgagccagctgcacaggggcctggacgctcggcctgaagtgactcgtaacgacgttgcaccaaccctcatgagtgtcccccggtatcttccccgccctgccaatcccgatgaaattggaaattttattgatgaa

SEQ ID NO: 203 - DNA, 2248 bp, Homo sapiens
aatctgaaagcggctgatactgaccccacagccccgccttatgattctctgctcgtgtttgactatgaaggaagcggttccgaagctgctagtctgagctccctgaactcctcagagtcagacaaagaccaggactatgactacttgaacgaatggggcaatcgcttcaagaagctggctgacatgtacggaggcggcgaggacgactaggggactcgagagaggcgggccccagacccatgtgctgggaaatgcagaaatcacgttgctggtggtttttcagctcccttcccttgagatgagtttctggggaaaaaaaagagactggttagtgatgcagttagtatagctttatactctctccactttatagctctaataagtttgtgttagaaaagtttcgacttatttcttaaagcttttttttttttcccatcactctttacatggtggtgatgtccaaaagatacccaaattttaatattccagaagaacaactttagcatcagaaggttcacccagcaccttgcagattttcttaaggaattttgtctcacttttaaaaagaaggggagaagtcagctactctagttctgttgttttgtgtatataattttttaaaaaaaatttgtgtgcttctgctcattactacactggtgtgtccctctgccttttttttttttttaagacagggtctcattctatcggccaggctggagtgcagtggtgcaatcacagctcactgcagccttgtcctcccaggctcaagctatccttgcacctcagcctcccaagtagctgggaccacaggcatgcaccactacgcatgactaattttttaaatatttgagacggggtctccctgtgttacccaggctggtctcaaactcctgggctcaagtgatcctcccatcttggcctcccagagtattgggattacagacatgagccactgcacctgcccagctccccaactccctgccattttttaagagacagtttcgctccatcgcccaggcctgggatgcagtgatgtgatcatagctcactgtaacctcaaactctggggctcaagcagttctcccaccagcctcctttttatttttttgtacagatggggtcttgctatgttgcccaagctggtcttaaactcctggcctcaagcaatccttctgccttggccccccaaagtgctgggattgtgggcatgagctgctgtgcccagcctccatgttttaatatcaactctcactcctgaattcagttgctttgcccaagataggagttctctgatgcagaaattattgggctcttttagggtaagaagtttgtgtctttgtctggccacatcttgactaggtattgtctactctgaagacctttaatggcttccctctttcatctcctgagtatgtaacttgcaatgggcagctatccagtgacttgttctgagtaagtgtgttcattaatgtttatttagctctgaagcaagagtgatatactccaggacttagaatagtgcctaaagtgctgcagccaaagacagagcggaactatgaaaagtgggcttggagatggcaggagagcttgtcattgagcctggcaatttagcaaactgatgctgaggatgattgaggtgggtctacctcatctctgaaaattctggaaggaatggaggagtctcaacatgtgtttctgacacaagatccgtggtttgtactcaaagcccagaatccccaagtgcctgcttttgatgatgtctacagaaaatgctggctgagctgaacacatttgcccaattccaggtgtgcacagaaaaccgagaatattcaaaattccaaatttttttcttaggagcaagaagaaaatgtggccctaaagggggttagttgaggggtagggggtagtgaggatcttgatttggatctctttttatttaaatgtgaatttcaacttttgacaatcaaagaaaagacttttgttgaaatagctttactgtttctcaagtgttttggagaaaaaaatcaaccctgcaatcactttttggaattgtcttgatttttcggcagttcaagctatatcgaatatagttctgtgtagagaatgtcactgtagttttgagtgtatacatgtgtgggtgctgataattgtgtattttctttgggggtggaaaaggaaaacaattcaagctgagaaaagtattctcaaagatgcatttttataaattttattaaacaattttgttaaa

SEQ ID NO: 204 - DNA, 4878 bp, Homo sapiens
agtggcgtcggaactgcaaagcacctgtgagcttgcggaagtcagttcagactccagcccgctccagcccggcccgacccgaccgcacccggcgcctgccctcgctcggcgtccccggccagccatgggcccttggagccgcagcctctcggcgctgctgctgctgctgcaggtctcctcttggctctgccaggagccggagccctgccaccctggctttgacgccgagagctacacgttcacggtgccccggcgccacctggagagaggccgcgtcctgggcagagtgaattttgaagattgcaccggtcgacaaaggacagcctatttttccctcgacacccgattcaaagtgggcacagatggtgtgattacagtcaaaaggcctctacggtttcataacccacagatccatttcttggtctacgcctgggactccacctacagaaagttttccaccaaagtcacgctgaatacagtggggcaccaccaccgccccccgccccatcaggcctccgtttctggaatccaagcagaattgctcacatttcccaactcctctcctggcctcagaagacagaagagagactgggttattcctcccatcagctgcccagaaaatgaaaaaggcccatttcctaaaaacctggttcagatcaaatccaacaaagacaaagaaggcaaggttttctacagcatcactggccaaggagctgacacaccccctgttggtgtctttattattgaaagagaaacaggatggctgaaggtgacagagcctctggatagagaacgcattgccacatacactctcttctctcacgctgtgtcatccaacgggaatgcagttgaggatccaatggagattttgatcacggtaaccgatcagaatgacaacaagcccgaattcacccaggaggtctttaaggggtctgtcatggaaggtgctcttccaggaacctctgtgatggaggtcacagccacagacgcggacgatgatgtgaacacctacaatgccgccatcgcttacaccatcctcagccaagatcctgagctccctgacaaaaatatgttcaccattaacaggaacacaggagtcatcagtgtggtcaccactgggctggaccgagagagtttccctacgtataccctggtggttcaagctgctgaccttcaaggtgaggggttaagcacaacagcaacagctgtgatcacagtcactgacaccaacgataatcctccgatcttcaatcccaccacgtacaagggtcaggtgcctgagaacgaggctaacgtcgtaatcaccacactgaaagtgactgatgctgatgcccccaataccccagcgtgggaggctgtatacaccatattgaatgatgatggtggacaatttgtcgtcaccacaaatccagtgaacaacgatggcattttgaaaacagcaaaggtttgtatggtacctggcaagatgcagaaactggcatcctcacagctgttcatacccttgtcccctgggcttggattttgaggccaagcagcagtacattctacacgtagcagtgacgaatgtggtaccttttgaggtctctctcaccacctccacagccaccgtcaccgtggatgtgctggatgtgaatgaagcccccatctttgtgcctcctgaaaagagagtggaagtgtccgaggactttggcgtgggccaggaaatcacatcctacactgcccaggagccagacacatttatggaacagaaaataacatatcggatttggagagacactgccaactggctggagattaatccggacactggtgccatttccactcgggctgagctggacagggaggattttgagcacgtgaagaacagcacgtacacagccctaatcatagctacagacaatggttctccagttgctactggaacagggacacttctgctgatcctgtctgatgtgaatgacaacgcccccataccagaacctcgaactatattcttctgtgagaggaatccaaagcctcaggtcataaacatcattgatgcagaccttcctcccaatacatctcccttcacagcagaactaacacacggggcgagtgccaactggaccattcagtacaacgacccaacccaagaatctatcattttgaagccaaagatggccttagaggtgggtgactacaaaatcaatctcaagctcatggataaccagaataaagaccaagtgaccaccttagaggtcagcgtgtgtgactgtgaaggggccgctggcgtctgtaggaaggcacagcctgtcgaagcaggattgcaaattcctgccattctggggattcttggaggaattcttgctttgctaattctgattctgctgctcttgctgtttcttcggaggagagcggtggtcaaagagcccttactgcccccagaggatgacacccgggacaacgtttattactatgatgaagaaggaggcggagaagaggaccaggactttgacttgagccagctgcacaggggcctggacgctcggcctgaagtgactcgtaacgacgttgcaccaaccctcatgagtgtcccccggtatcttccccgccctgccaatcccgatgaaattggaaattttattgatgaaaatctgaaagcggctgatactgaccccacagccccgccttatgattctctgctcgtgtttgactatgaaggaagcggttccgaagctgctagtctgagctccctgaactcctcagagtcagacaaagaccaggactatgactacttgaacgaatggggcaatcgcttcaagaagctggctgacatgtacggaggcggcgaggacgactaggggactcgagagaggcgggccccagacccatgtgctgggaaatgcagaaatcacgttgctggtggtttttcagctcccttcccttgagatgagtttctggggaaaaaaaagagactggttagtgatgcagttagtatagctttatactctctccactttatagctctaataagtttgtgttagaaaagtttcgacttatttcttaaagcttttttttttttcccatcactctttacatggtggtgatgtccaaaagatacccaaattttaatattccagaagaacaactttagcatcagaaggttcacccagcaccttgcagattttcttaaggaattttgtctcacttttaaaaagaaggggagaagtcagctactctagttctgttgttttgtgtatataattttttaaaaaaaatttgtgtgcttctgctcattactacactggtgtgtccctctgccttttttttttttttaagacagggtctcattctatcggccaggctggagtgcagtggtgcaatcacagctcactgcagccttgtcctcccaggctcaagctatccttgcacctcagcctcccaagtagctgggaccacaggcatgcaccactacgcatgactaattttttaaatatttgagacggggtctccctgtgttacccaggctggtctcaaactcctgggctcaagtgatcctcccatcttggcctcccagagtattgggattacagacatgagccactgcacctgcccagctccccaactccctgccattttttaagagacagtttcgctccatcgcccaggcctgggatgcagtgatgtgatcatagctcactgtaacctcaaactctggggctcaagcagttctcccaccagcctcctttttatttttttgtacagatggggtcttgctatgttgcccaagctggtcttaaactcctggcctcaagcaatccttctgccttggccccccaaagtgctgggattgtgggcatgagctgctgtgcccagcctccatgttttaatatcaactctcactcctgaattcagttgctttgcccaagataggagttctctgatgcagaaattattgggctcttttagggtaagaagtttgtgtctttgtctggccacatcttgactaggtattgtctactctgaagacctttaatggcttccctctttcatctcctgagtatgtaacttgcaatgggcagctatccagtgacttgttctgagtaagtgtgttcattaatgtttatttagctctgaagcaagagtgatatactccaggacttagaatagtgcctaaagtgctgcagccaaagacagagcggaactatgaaaagtgggcttggagatggcaggagagcttgtcattgagcctggcaatttagcaaactgatgctgaggatgattgaggtgggtctacctcatctctgaaaattctggaaggaatggaggagtctcaacatgtgtttctgacacaagatccgtggtttgtactcaaagcccagaatccccaagtgcctgcttttgatgatgtctacagaaaatgctggctgagctgaacacatttgcccaattccaggtgtgcacagaaaaccgagaatattcaaaattccaaatttttttcttaggagcaagaagaaaatgtggccctaaagggggttagttgaggggtagggggtagtgaggatcttgatttggatctctttttatttaaatgtgaatttcaacttttgacaatcaaagaaaagacttttgttgaaatagctttactgtttctcaagtgttttggagaaaaaaatcaaccctgcaatcactttttggaattgtcttgatttttcggcagttcaagctatatcgaatatagttctgtgtagagaatgtcactgtagttttgagtgtatacatgtgtgggtgctgataattgtgtattttctttgggggtggaaaaggaaaacaattcaagctgagaaaagtattctcaaagatgcatttttataaattttattaaacaattttgttaaa

SEQ ID NO: 205 - protein, 5 aa, Homo sapiens
MEQKI

SEQ ID NO: 206 - protein, 48 aa, Homo sapiens
YRIWRDTANWLEINPDTGAISTRAELDREDFEHVKNSTYTALIIATDN

SEQ ID NO: 207 - protein, 74 aa, Homo sapiens
SPVATGTGTLLLILSDVNDNAPIPEPRTIFFCERNPKPQVINIIDADLPPNTSPFTAELTHGASANWTIQYNDP

SEQ ID NO: 208 - protein, 75 aa, Homo sapiens
QESIILKPKMALEVGDYKINLKLMDNQNKDQVTTLEVSVCDCEGAAGVCRKAQPVEAGLQIPAILGILGGILALL

SEQ ID NO: 209 - protein, 43 aa, Homo sapiens
LILLLLLFLRRRAVVKEPLLPPEDDTRDNVYYYDEEGGGEEDQ

SEQ ID NO: 210 - protein, 48 aa, Homo sapiens
DFDLSQLHRGLDARPEVTRNDVAPTLMSVPRYLPRPANPDEIGNFIDE

SEQ ID NO: 211 - protein, 69 aa, Homo sapiens
NLKAADTDPTAPPYDSLLVFDYEGSGSEAASLSSLNSSESDKDQDYDYLNEWGNRFKKLADMYGGGEDD

SEQ ID NO: 212 - protein, 366 aa, Homo sapiens
MEQKITYRIWRDTANWLEINPDTGAISTRAELDREDFEHVKNSTYTALIIATDNGSPVATGTGTLLLILSDVNDNAPIPEPRTIFFCERNPKPQVINIIDADLPPNTSPFTAELTHGASANWTIQYNDPTQESIILKPKMALEVGDYKINLKLMDNQNKDQVTTLEVSVCDCEGAAGVCRKAQPVEAGLQIPAILGILGGILALLILILLLLLFLRRRAVVKEPLLPPEDDTRDNVYYYDEEGGGEEDQDFDLSQLHRGLDARPEVTRNDVAPTLMSVPRYLPRPANPDEIGNFIDENLKAADTDPTAPPYDSLLVFDYEGSGSEAASLSSLNSSESDKDQDYDYLNEWGNRFKKLADMYGGGEDD

SEQ ID NO: 213 - DNA, 1902 bp, Homo sapiens
agtggcgtcggaactgcaaagcacctgtgagcttgcggaagtcagttcagactccagcccgctccagcccggcccgacccgaccgcacccggcgcctgccctcgctcggcgtccccggccagccatgggcccttggagccgcagcctctcggcgctgctgctgctgctgcaggtctcctcttggctctgccaggagccggagccctgccaccctggctttgacgccgagagctacacgttcacggtgccccggcgccacctggagagaggccgcgtcctgggcagagtgaattttgaagattgcaccggtcgacaaaggacagcctatttttccctcgacacccgattcaaagtgggcacagatggtgtgattacagtcaaaaggcctctacggtttcataacccacagatccatttcttggtctacgcctgggactccacctacagaaagttttccaccaaagtcacgctgaatacagtggggcaccaccaccgccccccgccccatcaggcctccgtttctggaatccaagcagaattgctcacatttcccaactcctctcctggcctcagaagacagaagagagactgggttattcctcccatcagctgcccagaaaatgaaaaaggcccatttcctaaaaacctggttcagatcaaatccaacaaagacaaagaaggcaaggttttctacagcatcactggccaaggagctgacacaccccctgttggtgtctttattattgaaagagaaacaggatggctgaaggtgacagagcctctggatagagaacgcattgccacatacactctcttctctcacgctgtgtcatccaacgggaatgcagttgaggatccaatggagattttgatcacggtaaccgatcagaatgacaacaagcccgaattcacccaggaggtctttaaggggtctgtcatggaaggtgctcttccaggaacctctgtgatggaggtcacagccacagacgcggacgatgatgtgaacacctacaatgccgccatcgcttacaccatcctcagccaagatcctgagctccctgacaaaaatatgttcaccattaacaggaacacaggagtcatcagtgtggtcaccactgggctggaccgagagagtttccctacgtataccctggtggttcaagctgctgaccttcaaggtgaggggttaagcacaacagcaacagctgtgatcacagtcactgacaccaacgataatcctccgatcttcaatcccaccacgtacaagggtcaggtgcctgagaacgaggctaacgtcgtaatcaccacactgaaagtgactgatgctgatgcccccaataccccagcgtgggaggctgtatacaccatattgaatgatgatggtggacaatttgtcgtcaccacaaatccagtgaacaacgatggcattttgaaaacagcaaaggtttgtatggtacctggcaagatgcagaaactggcatcctcacagctgttcatacccttgtcccctgggcttggattttgaggccaagcagcagtacattctacacgtagcagtgacgaatgtggtaccttttgaggtctctctcaccacctccacagccaccgtcaccgtggatgtgctggatgtgaatgaagcccccatctttgtgcctcctgaaaagagagtggaagtgtccgaggactttggcgtgggccaggaaatcacatcctacactgcccaggagccagacacatttatggaacagaaaataacatatcggatttggagagacactgccaactggctggagattaatccggacactggtgccatttccactcgggctgagctggacagggaggattttgagcacgtgaagaacagcacgtacacagccctaatcatagctacagacaatg

SEQ ID NO: 214 - protein, 53 aa, Homo sapiens
MEQKIYRIWRDTANWLEINPDTGAISTRAELDREDFEHVKNSTYTALIIATDN

SEQ ID NO: 215 - DNA, 43 bp, Homo sapiens
atggcgctcctgctgtgcttcgtgctcctgtgcggagtagtgg

SEQ ID NO: 216 - DNA, 58 bp, Homo sapiens; identical to SEQ ID NO: 10

SEQ ID NO: 217 - DNA, 101 bp, Homo sapiens
atggcgctcctgctgtgcttcgtgctcctgtgcggagtagtggccttgcctccccgattgaaagagatgaaaagccaggaatcggctgcaggttccaaact

SEQ ID NO: 218 - protein, 33 aa, Homo sapiens
MALLLCFVLLCGVVALPPRLKEMKSQESAAGSK

SEQ ID NO: 219 - DNA, 130 bp, Homo sapiens
agtcgggagcgcgcgaggcgcggggagcctgggaccaggagcgagagccgcctacctgcagccgccgcccacggcacggcagccaccatggcgctcctgctgtgcttcgtgctcctgtgcggagtagtgg

SEQ ID NO: 220 - DNA, 167 bp, Homo sapiens
atttcgccagaagtttgagtatcactactcctgaagagatgattgaaaaagccaaaggggaaactgcctatctgccatgcaaatttacgcttagtcccgaagaccagggaccgctggacatcgagtggctgatatcaccagctgataatcagaaggtggatcaagtg

SEQ ID NO: 221 - DNA, 205 bp, Homo sapiens
attattttatattctggagacaaaatttatgatgactactatccagatctgaaaggccgagtacattttacgagtaatgatctcaaatctggtgatgcatcaataaatgtaacgaatttacaactgtcagatattggcacatatcagtgcaaagtgaaaaaagctcctggtgttgcaaataagaagattcatctggtagttcttg

SEQ ID NO: 222 - DNA, 156 bp, Homo sapiens
ttaagccttcaggtgcgagatgttacgttgatggatctgaagaaattggaagtgactttaagataaaatgtgaaccaaaagaaggttcacttccattacagtatgagtggcaaaaattgtctgactcacagaaaatgcccacttcatggttagcag

SEQ ID NO: 223 - DNA, 4683 bp, Homo sapiens
ggaagatgtgccacctccaaagagccgtacgtccactgccagaagctacatcggcagtaatcattcatccctggggtccatgtctccttccaacatggaaggatattccaagactcagtataaccaagtaccaagtgaagactttgaacgcactcctcagagtccgactctcccacctgctaaggtagctgcccctaatctaagtcgaatgggtgcgattcctgtgatgattccagcacagagcaaggatgggtctatagtatagagcctccatatgtctcatctgtgctctccgtgttcctttcctttttttgatatatgaaaacctattctggtctaaattgtgttactagcctcaaaatacatcaaaaaataagttaatcaggaactgtacggaatatatttttaaaaatttttgtttggttatatcgaaatagttacaggcactaaagttagtaaagaaaagtttaccatctgaaaaagctggattttctttaagaggttgattataaagttttctaaatttatcagtacctaagtaagatgtagcgctttgaatatgaaatcataggtgaagacatgggtgaacttacttgcataccaagttgatacttgaataaccatctgaaagtggtacttgatcatttttaccattatttttaggatgtgtatttcatttatttatggcccaccagtctcccccaaattagtacagaaatatccatgacaaaattacttacgtatgtttgtacttggttttacagctcctttgaaaactctgtgtttggaatatctctaaaaacatagaaaacactacagtggtttagaaattactaattttacttctaagtcattcataaaccttgtctatgaaatgacttcttaaatatttagttgatagactgctacaggtaatagggacttagcaagctcttttatatgctaaaggagcatctatcagattaagttagaacatttgctgtcagccacatattgagatgacactaggtgcaatagcagggatagattttgttggtgagtagtctcatgccttgagatctgtggtggtcttcaaaatggtggccagccagatcaaggatgtagtatctcatagttcccaggtgatatttttcttattagaaaaatattataactcatttgttgtttgacacttatagattgaaatttcctaatttattctaaattttaagtggttctttggttccagtgctttatgttgttgttgtttttggatggtgttacatattatatgttctagaaacatgtaatcctaaatttaccctcttgaatataatccctggatgatattttttatcataaatgcagaataatcaaatacattttaagcaagttaagtgtcctccatcaattctgtattccagacttgggaggatgtacagttgctgttgtgtgatcaaacatgtctctgtgtagttccagcaaatcaagctgagctttgaaaaagtttgtcttagttttgtgaaggtgatttattcttaaaaaaaaaaaagaaagaaaaagaaaaaaagataagaaggaggagtaaagggactactcctccttgccaaatgtgctaaatatcattttaggagaagaaagtgggtttattgtatttcccttaagattgtgagggagtgtggatacagtagaatgagccaacagtttctttataataaatacggtctgcaataaattatttcactagctctaaaacctttccctagattttagtagggagttggtttctgttaatatctttgggtgctgtggtggtaaatgctatattatgaacggtggcatgtatttacagttagagtattgtgtgtacactttttaatggtaaacttaagctgaatgtgtaatggatttgtgtatagttttacatatttggaagcattttaaaaacaggttttaaccttatgtaaaattacttttatactcgtgttaacattttcatctgtgccttttggtaatttaatttctattatgaatttctggtgcctatgagctagctatcacctacctgaaaggtgcttagaggtgaaggtactgtttctaaaaacacatcactgtgatacctttctatcctcacattttcaagcttgcctcttttctgttctttgtggatataacttaagcaattgtgttattcataaaggtttagaaatttcaatattcccaacactctatgtttctgattttataacagtagccatttttgaaagtcagatgtttggcctgttttatatgaataaagtttatttataaaatattataaaaaataagtaaataaacagaacattaataataaagttttggttcttcctattcctgactttcatataatgaaaattatcctattgatctaagtagaagttatcatagaaagtggacacgtataagactttccttcctttttttttttaataacatatgaggaacaagacttctcttcccatatacttcatattttagaggacattgttttaaaggcttatgtctcactgtaaaattctgtcagccaaatagtaccaatacgttttcaagtagttctcactgataatttagttgaaccagagatcaaatatttgctcccgaattactactggtaatcaagtagttgaacaaaaaattactaaagcatttccgttagatcagtcaaggacagtactgcatctttttttttttttttttttttaagacggagtctcggtctgtcacccaggctggagtgcagtggcgggatctcggctcactgcaagctccgcctcccaggttcacgccattctcctgcctcagcctcccgagcagctgggactacaggctcccatcaccacgctcggctaagtttttgtaattttagtagagacagggtttcaccgtgttagccaggatggtctcgatctcctgacctcgtgatctgcctgcctcggcctcccaaagtgctgggattacaggcgtgaaccactgcacccggcccagtactgcatcttaacagcaaagccattttattctactttataactgagagacttgataccatccatctctttaggttacagaggataatttgaagagaaatgttactgtagaatatatagttctgtactttttttttttttttttaagagatagggtttcactattgctcaggctggtctcaaactgctgggctcaggagatcctcctgccttggcctcccaaattgctgggattacaggtgtgagccgcagcatccagccagttctgtactttgaatatggagtagtttacagctatttttttttcttactggtaatcttaactaatatgattcccttgttagagagcctctcactcccccacccccaaaaatgtctactattcatgacagtaaccaattattctggacaaattgcttctttttaatttgagctatctgccatggactttctaaaatggaaacacagcctgagtgtatcttagggagagtttgattgaaaaaatccaaatcactatccatatagatcatggatataaagagatacctgatttttattaaaaagatactttttcaaatttaagagttaatcttggaaatttggaacaagtaaaggggcaagtaaaccttttgatgaaatataaaaggaactcattgcatgaagttgactatcaaattctgtgatgtgtggcttcttaaaaatattctcagtgtcttttgtgtgcgtgcagcatgtacatttgatgttatgtgaatgttgagttttttcttctaattttcacttcagcagtgtttagggctttcagatgccttattccagtgtgaacagaaaaagttcatattttatgtggttaatgctttgatgtgtcacataaagagtagtttgtagaaaatgttggcacaattttaacttcttagtggcttgtgacattatatattatatatatatatgtacatatatctttataacattcctgtgtttagtagtgtaaatgttctgggcaagttttaatattttgaatgcctttggatattccagcaataaaggcatcatgttctgcaataggatttcttactcatttacctattttaacactaaaatagaccacaactgagcacaaattccttttataaatgttatagaagcagggaagaataataaacacatttgtgaattgtggttcagtttatttatctttagggaaggctgatcatttatcttatagcagataaccccagcctcttattcattatggttaacttttataatttatcttattttataatttaagaatatagtacatatcagttgggtttggttttggtcatcgagactaaaagctccatcaaaacagaactttgtgttttctgctaacttatttaatgacacaagttttaagagaaccacaattcattgattcacttattcttttccctaattgtgaattttagtgataaatacacctgtactactgaggaaaatattctgacacttcacgtgtgcaaagtatagaactgacagtgtcagtttcagattttgtatgtacgatttctggcttatatatccaatggtgcagattttgaaatttgtaagaacaaaatttgttaagaaaaacaacttgctctagttttgtgaccttgtgtacttttgaaataaaatcaagaaagcagttctctgcctc

SEQ ID NO: 224 - DNA, 5341 bp, Homo sapiens
agtcgggagcgcgcgaggcgcggggagcctgggaccaggagcgagagccgcctacctgcagccgccgcccacggcacggcagccaccatggcgctcctgctgtgcttcgtgctcctgtgcggagtagtggatttcgccagaagtttgagtatcactactcctgaagagatgattgaaaaagccaaaggggaaactgcctatctgccatgcaaatttacgcttagtcccgaagaccagggaccgctggacatcgagtggctgatatcaccagctgataatcagaaggtggatcaagtgattattttatattctggagacaaaatttatgatgactactatccagatctgaaaggccgagtacattttacgagtaatgatctcaaatctggtgatgcatcaataaatgtaacgaatttacaactgtcagatattggcacatatcagtgcaaagtgaaaaaagctcctggtgttgcaaataagaagattcatctggtagttcttgttaagccttcaggtgcgagatgttacgttgatggatctgaagaaattggaagtgactttaagataaaatgtgaaccaaaagaaggttcacttccattacagtatgagtggcaaaaattgtctgactcacagaaaatgcccacttcatggttagcagggaagatgtgccacctccaaagagccgtacgtccactgccagaagctacatcggcagtaatcattcatccctggggtccatgtctccttccaacatggaaggatattccaagactcagtataaccaagtaccaagtgaagactttgaacgcactcctcagagtccgactctcccacctgctaaggtagctgcccctaatctaagtcgaatgggtgcgattcctgtgatgattccagcacagagcaaggatgggtctatagtatagagcctccatatgtctcatctgtgctctccgtgttcctttcctttttttgatatatgaaaacctattctggtctaaattgtgttactagcctcaaaatacatcaaaaaataagttaatcaggaactgtacggaatatatttttaaaaatttttgtttggttatatcgaaatagttacaggcactaaagttagtaaagaaaagtttaccatctgaaaaagctggattttctttaagaggttgattataaagttttctaaatttatcagtacctaagtaagatgtagcgctttgaatatgaaatcataggtgaagacatgggtgaacttacttgcataccaagttgatacttgaataaccatctgaaagtggtacttgatcatttttaccattatttttaggatgtgtatttcatttatttatggcccaccagtctcccccaaattagtacagaaatatccatgacaaaattacttacgtatgtttgtacttggttttacagctcctttgaaaactctgtgtttggaatatctctaaaaacatagaaaacactacagtggtttagaaattactaattttacttctaagtcattcataaaccttgtctatgaaatgacttcttaaatatttagttgatagactgctacaggtaatagggacttagcaagctcttttatatgctaaaggagcatctatcagattaagttagaacatttgctgtcagccacatattgagatgacactaggtgcaatagcagggatagattttgttggtgagtagtctcatgccttgagatctgtggtggtcttcaaaatggtggccagccagatcaaggatgtagtatctcatagttcccaggtgatatttttcttattagaaaaatattataactcatttgttgtttgacacttatagattgaaatttcctaatttattctaaattttaagtggttctttggttccagtgctttatgttgttgttgtttttggatggtgttacatattatatgttctagaaacatgtaatcctaaatttaccctcttgaatataatccctggatgatattttttatcataaatgcagaataatcaaatacattttaagcaagttaagtgtcctccatcaattctgtattccagacttgggaggatgtacagttgctgttgtgtgatcaaacatgtctctgtgtagttccagcaaatcaagctgagctttgaaaaagtttgtcttagttttgtgaaggtgatttattcttaaaaaaaaaaaagaaagaaaaagaaaaaaagataagaaggaggagtaaagggactactcctccttgccaaatgtgctaaatatcattttaggagaagaaagtgggtttattgtatttcccttaagattgtgagggagtgtggatacagtagaatgagccaacagtttctttataataaatacggtctgcaataaattatttcactagctctaaaacctttccctagattttagtagggagttggtttctgttaatatctttgggtgctgtggtggtaaatgctatattatgaacggtggcatgtatttacagttagagtattgtgtgtacactttttaatggtaaacttaagctgaatgtgtaatggatttgtgtatagttttacatatttggaagcattttaaaaacaggttttaaccttatgtaaaattacttttatactcgtgttaacattttcatctgtgccttttggtaatttaatttctattatgaatttctggtgcctatgagctagctatcacctacctgaaaggtgcttagaggtgaaggtactgtttctaaaaacacatcactgtgatacctttctatcctcacattttcaagcttgcctcttttctgttctttgtggatataacttaagcaattgtgttattcataaaggtttagaaatttcaatattcccaacactctatgtttctgattttataacagtagccatttttgaaagtcagatgtttggcctgttttatatgaataaagtttatttataaaatattataaaaaataagtaaataaacagaacattaataataaagttttggttcttcctattcctgactttcatataatgaaaattatcctattgatctaagtagaagttatcatagaaagtggacacgtataagactttccttcctttttttttttaataacatatgaggaacaagacttctcttcccatatacttcatattttagaggacattgttttaaaggcttatgtctcactgtaaaattctgtcagccaaatagtaccaatacgttttcaagtagttctcactgataatttagttgaaccagagatcaaatatttgctcccgaattactactggtaatcaagtagttgaacaaaaaattactaaagcatttccgttagatcagtcaaggacagtactgcatctttttttttttttttttttttaagacggagtctcggtctgtcacccaggctggagtgcagtggcgggatctcggctcactgcaagctccgcctcccaggttcacgccattctcctgcctcagcctcccgagcagctgggactacaggctcccatcaccacgctcggctaagtttttgtaattttagtagagacagggtttcaccgtgttagccaggatggtctcgatctcctgacctcgtgatctgcctgcctcggcctcccaaagtgctgggattacaggcgtgaaccactgcacccggcccagtactgcatcttaacagcaaagccattttattctactttataactgagagacttgataccatccatctctttaggttacagaggataatttgaagagaaatgttactgtagaatatatagttctgtactttttttttttttttttaagagatagggtttcactattgctcaggctggtctcaaactgctgggctcaggagatcctcctgccttggcctcccaaattgctgggattacaggtgtgagccgcagcatccagccagttctgtactttgaatatggagtagtttacagctatttttttttcttactggtaatcttaactaatatgattcccttgttagagagcctctcactcccccacccccaaaaatgtctactattcatgacagtaaccaattattctggacaaattgcttctttttaatttgagctatctgccatggactttctaaaatggaaacacagcctgagtgtatcttagggagagtttgattgaaaaaatccaaatcactatccatatagatcatggatataaagagatacctgatttttattaaaaagatactttttcaaatttaagagttaatcttggaaatttggaacaagtaaaggggcaagtaaaccttttgatgaaatataaaaggaactcattgcatgaagttgactatcaaattctgtgatgtgtggcttcttaaaaatattctcagtgtcttttgtgtgcgtgcagcatgtacatttgatgttatgtgaatgttgagttttttcttctaattttcacttcagcagtgtttagggctttcagatgccttattccagtgtgaacagaaaaagttcatattttatgtggttaatgctttgatgtgtcacataaagagtagtttgtagaaaatgttggcacaattttaacttcttagtggcttgtgacattatatattatatatatatatgtacatatatctttataacattcctgtgtttagtagtgtaaatgttctgggcaagttttaatattttgaatgcctttggatattccagcaataaaggcatcatgttctgcaataggatttcttactcatttacctattttaacactaaaatagaccacaactgagcacaaattccttttataaatgttatagaagcagggaagaataataaacacatttgtgaattgtggttcagtttatttatctttagggaaggctgatcatttatcttatagcagataaccccagcctcttattcattatggttaacttttataatttatcttattttataatttaagaatatagtacatatcagttgggtttggttttggtcatcgagactaaaagctccatcaaaacagaactttgtgttttctgctaacttatttaatgacacaagttttaagagaaccacaattcattgattcacttattcttttccctaattgtgaattttagtgataaatacacctgtactactgaggaaaatattctgacacttcacgtgtgcaaagtatagaactgacagtgtcagtttcagattttgtatgtacgatttctggcttatatatccaatggtgcagattttgaaatttgtaagaacaaaatttgttaagaaaaacaacttgctctagttttgtgaccttgtgtacttttgaaataaaatcaagaaagcagttctctgcctc

SEQ ID NO: 225 - protein, 14 aa, Homo sapiens
MALLLCFVLLCGVV

SEQ ID NO: 226 - protein, 55 aa, Homo sapiens
FARSLSITTPEEMIEKAKGETAYLPCKFTLSPEDQGPLDIEWLISPADNQKVDQV

SEQ ID NO: 227 - protein, 68 aa, Homo sapiens
IILYSGDKIYDDYYPDLKGRVHFTSNDLKSGDASINVTNLQLSDIGTYQCKVKKAPGVANKKIHLVVL

SEQ ID NO: 228 - protein, 51 aa, Homo sapiens
KPSGARCYVDGSEEIGSDFKIKCEPKEGSLPLQYEWQKLSDSQKMPTSWLA

SEQ ID NO: 229 - protein, 61 aa, Homo sapiens
KMCHLQRAVRPLPEATSAVIIHPWGPCLLPTWKDIPRLSITKYQVKTLNALLRVRLSHLLR

SEQ ID NO: 230 - protein, 252 aa, Homo sapiens
MALLLCFVLLCGVVDFARSLSITTPEEMIEKAKGETAYLPCKFTLSPEDQGPLDIEWLISPADNQKVDQVIILYSGDKIYDDYYPDLKGRVHFTSNDLKSGDASINVTNLQLSDIGTYQCKVKKAPGVANKKIHLVVLVKPSGARCYVDGSEEIGSDFKIKCEPKEGSLPLQYEWQKLSDSQKMPTSWLAGKMCHLQRAVRPLPEATSAVIIHPWGPCLLPTWKDIPRLSITKYQVKTLNALLRVRLSHLLR

SEQ ID NO: 231 - DNA, 141 bp, Homo sapiens
gggagctgttcaaaaaacgagctctttctactcctgtagtagaaaaacgttcagcatcttctgagtcatcatcatcatcgtcaaagaagaagaaaacaaaggtagaacatggaggatcgtcaggctctaaacaaaattctg

SEQ ID NO: 232 - DNA, 127 bp, Homo sapiens
ccttgcctccccgattgaaagagatgaaaagccaggaatcggctgcaggttccaaactagtccttcggtgtgaaaccagttctgaatactcctctctcagattcaagtggttcaagaatgggaatga

SEQ ID NO: 233 - DNA, 268 bp, Homo sapiens
gggagctgttcaaaaaacgagctctttctactcctgtagtagaaaaacgttcagcatcttctgagtcatcatcatcatcgtcaaagaagaagaaaacaaaggtagaacatggaggatcgtcaggctctaaacaaaattctgccttgcctccccgattgaaagagatgaaaagccaggaatcggctgcaggttccaaactagtccttcggtgtgaaaccagttctgaatactcctctctcagattcaagtggttcaagaatgggaatga

SEQ ID NO: 234 - protein, 88 aa, Homo sapiens
ELFKKRALSTPVVEKRSASSESSSSSSKKKKTKVEHGGSSGSKQNSALPPRLKEMKSQESAAGSKLVLRCETSSEYSSLRFKWFKNGN

SEQ ID NO: 235 - DNA, 264 bp, Homo sapiens
actgagctcctagcacccgatcgggaagtggcgggcggagtcccgggtccagtcgccgcctcagctaccgccgctgccgccgccgccgccgccaccgccagtggtgagaccccgacctggcgggtcagcgctgggcgtgcgtgcgggcaggcgggggcgctgacgagaagcaggaagagggtgcagtgccggcgtgggcggccggccgaggcggaggcgcaggaagggggcggcgagtcgtgcgaggctgcccttctcactcag

SEQ ID NO: 236 - DNA, 170 bp, Homo sapiens
cattatggatccaagcctgttgagagaaagggagctgttcaaaaaacgagctctttctactcctgtagtagaaaaacgttcagcatcttctgagtcatcatcatcatcgtcaaagaagaagaaaacaaaggtagaacatggaggatcgtcaggctctaaacaaaattctg

SEQ ID NO: 237 - DNA, 92 bp, Homo sapiens
atcatagcaatggatcatttaacttgaaagctttgtcaggaagctctggatataagtttggtgttcttgctaagattgtgaattacatgaag

SEQ ID NO: 238 - DNA, 108 bp, Homo sapiens
acacggcatcagcgaggagatacgcatcctctaaccttagatgaaattttggatgaaacacaacatttagatattggactcaagcagaaacaatggctaatgactgag

SEQ ID NO: 239 - DNA, 183 bp, Homo sapiens
gctttagtcaacaatcccaaaattgaagtaatagatgggaagtatgctttcaagcccaagtacaacgtgagagataagaaggccctacttaggctcttagatcagcatgaccagcgaggattaggaggaattcttttagaagacatagaagaagcactgcccaattcccagaaagctgtcaag

SEQ ID NO: 240 - DNA, 94 bp, Homo sapiens
gctttgggggaccagatactatttgtaaatcgtcccgataagaagaaaatacttttcttcaatgataagagctgtcagttttctgtggatgaag

SEQ ID NO: 241 - DNA, 116 bp, Homo sapiens
aatttcagaaactgtggaggagtgtcactgtagattccatggacgaggagaaaattgaagaatatctgaagcgacagggtatttcttccatgcaggaatctggaccaaagaaagtg

SEQ ID NO: 242 - DNA, 720 bp, Homo sapiens
gcccctattcagagaaggaaaaagcctgcttcacagaaaaagcgacgctttaagactcataacgaacacttggctggagtgctgaaggattactctgacattacttccagcaaatagggaacagttttgccctggaacagagttacagatacacaatcaagagtgttcttgctgatgctcggggtctgaagactgtcttcctatctgcttcttgcggctgaggagaggagcagttcagtttacaaaacaagtgcaaattaccaaactcaaagcttatttgagtagaatgggctcatgggcaatgtgatgttccctgttaaccttctgttactccctgggagaaaggcgctgagcgtggcatgcaggtgtctttgctgtgtttttctccacttctaaatggttcctggttcctttcttcctcgtttgttactttagagcaagtttgcccatagtcttgaatgcaatatttgtttattccaaaagaacatatttataataaaatcactgtagaaggatttttaagatgttagtgaattctgtttcttttcattctcggaaatggcaggaagcagctccagtctctgatttccatgggtcacgtgctggggatgtgatgaagcctgcagtctgcactgtgttgctgagcacatggatttcaccactggaacacaggtgtgctgcttgttagcaagcagagcaataaagatgtgctggatgtca

SEQ ID NO: 243 - DNA, 1747 bp, Homo sapiens
actgagctcctagcacccgatcgggaagtggcgggcggagtcccgggtccagtcgccgcctcagctaccgccgctgccgccgccgccgccgccaccgccagtggtgagaccccgacctggcgggtcagcgctgggcgtgcgtgcgggcaggcgggggcgctgacgagaagcaggaagagggtgcagtgccggcgtgggcggccggccgaggcggaggcgcaggaagggggcggcgagtcgtgcgaggctgcccttctcactcagcattatggatccaagcctgttgagagaaagggagctgttcaaaaaacgagctctttctactcctgtagtagaaaaacgttcagcatcttctgagtcatcatcatcatcgtcaaagaagaagaaaacaaaggtagaacatggaggatcgtcaggctctaaacaaaattctgatcatagcaatggatcatttaacttgaaagctttgtcaggaagctctggatataagtttggtgttcttgctaagattgtgaattacatgaagacacggcatcagcgaggagatacgcatcctctaaccttagatgaaattttggatgaaacacaacatttagatattggactcaagcagaaacaatggctaatgactgaggctttagtcaacaatcccaaaattgaagtaatagatgggaagtatgctttcaagcccaagtacaacgtgagagataagaaggccctacttaggctcttagatcagcatgaccagcgaggattaggaggaattcttttagaagacatagaagaagcactgcccaattcccagaaagctgtcaaggctttgggggaccagatactatttgtaaatcgtcccgataagaagaaaatacttttcttcaatgataagagctgtcagttttctgtggatgaagaatttcagaaactgtggaggagtgtcactgtagattccatggacgaggagaaaattgaagaatatctgaagcgacagggtatttcttccatgcaggaatctggaccaaagaaagtggcccctattcagagaaggaaaaagcctgcttcacagaaaaagcgacgctttaagactcataacgaacacttggctggagtgctgaaggattactctgacattacttccagcaaatagggaacagttttgccctggaacagagttacagatacacaatcaagagtgttcttgctgatgctcggggtctgaagactgtcttcctatctgcttcttgcggctgaggagaggagcagttcagtttacaaaacaagtgcaaattaccaaactcaaagcttatttgagtagaatgggctcatgggcaatgtgatgttccctgttaaccttctgttactccctgggagaaaggcgctgagcgtggcatgcaggtgtctttgctgtgtttttctccacttctaaatggttcctggttcctttcttcctcgtttgttactttagagcaagtttgcccatagtcttgaatgcaatatttgtttattccaaaagaacatatttataataaaatcactgtagaaggatttttaagatgttagtgaattctgtttcttttcattctcggaaatggcaggaagcagctccagtctctgatttccatgggtcacgtgctggggatgtgatgaagcctgcagtctgcactgtgttgctgagcacatggatttcaccactggaacacaggtgtgctgcttgttagcaagcagagcaataaagatgtgctggatgtca

SEQ ID NO: 244 - protein, 55 aa, Homo sapiens
MDPSLLRERELFKKRALSTPVVEKRSASSESSSSSSKKKKTKVEHGGSSGSKQNS

SEQ ID NO: 245 - protein, 30 aa, Homo sapiens
HSNGSFNLKALSGSSGYKFGVLAKIVNYMK

SEQ ID NO: 246 - protein, 36 aa, Homo sapiens
TRHQRGDTHPLTLDEILDETQHLDIGLKQKQWLMTE

SEQ ID NO: 247 - protein, 61 aa, Homo sapiens
ALVNNPKIEVIDGKYAFKPKYNVRDKKALLRLLDQHDQRGLGGILLEDIEEALPNSQKAVK

SEQ ID NO: 248 - protein, 31 aa, Homo sapiens
ALGDQILFVNRPDKKKILFFNDKSCQFSVDE

SEQ ID NO: 249 - protein, 38 aa, Homo sapiens
FQKLWRSVTVDSMDEEKIEEYLKRQGISSMQESGPKKV

SEQ ID NO: 250 - protein, 38 aa, Homo sapiens
APIQRRKKPASQKKRRFKTHNEHLAGVLKDYSDITSSK

SEQ ID NO: 251 - protein, 291 aa, Homo sapiens
MDPSLLRERELFKKRALSTPVVEKRSASSESSSSSSKKKKTKVEHGGSSGSKQNSDHSNGSFNLKALSGSSGYKFGVLAKIVNYMKTRHQRGDTHPLTLDEILDETQHLDIGLKQKQWLMTEALVNNPKIEVIDGKYAFKPKYNVRDKKALLRLLDQHDQRGLGGILLEDIEEALPNSQKAVKALGDQILFVNRPDKKKILFFNDKSCQFSVDEEFQKLWRSVTVDSMDEEKIEEYLKRQGISSMQESGPKKVAPIQRRKKPASQKKRRFKTHNEHLAGVLKDYSDITSSK

SEQ ID NO: 252 - DNA, 434 bp, Homo sapiens
actgagctcctagcacccgatcgggaagtggcgggcggagtcccgggtccagtcgccgcctcagctaccgccgctgccgccgccgccgccgccaccgccagtggtgagaccccgacctggcgggtcagcgctgggcgtgcgtgcgggcaggcgggggcgctgacgagaagcaggaagagggtgcagtgccggcgtgggcggccggccgaggcggaggcgcaggaagggggcggcgagtcgtgcgaggctgcccttctcactcagcattatggatccaagcctgttgagagaaagggagctgttcaaaaaacgagctctttctactcctgtagtagaaaaacgttcagcatcttctgagtcatcatcatcatcgtcaaagaagaagaaaacaaaggtagaacatggaggatcgtcaggctctaaacaaaattctg

SEQ ID NO: 253 - DNA, 88 bp, Homo sapiens
atcctaaacagcacatccaatcacctgtggctagagttcaacaccaatggatctgacaccgaccaaggttttcaactcacctatacca

SEQ ID NO: 254 - DNA, 62 bp, Homo sapiens
ctacatctacatccaccactgggacaagccatcttgtaaaatgtgcggagaaggagaaaact

SEQ ID NO: 255 - DNA, 150 bp, Homo sapiens
atcctaaacagcacatccaatcacctgtggctagagttcaacaccaatggatctgacaccgaccaaggttttcaactcacctataccactacatctacatccaccactgggacaagccatcttgtaaaatgtgcggagaaggagaaaact

SEQ ID NO: 256 - protein, 50 aa, Homo sapiens
ILNSTSNHLWLEFNTNGSDTDQGFQLTYTTTSTSTTGTSHLVKCAEKEKT

SEQ ID NO: 257 - DNA, 583 bp, Homo sapiens
ctccacggcagcggctccttgtgccactagcagcccttcttctgcgctctccgccttttctctctagactggatctctcctcccccccgcgcccccctccccgcatctcccactcgctggctctctctccagctgcctcctctccaggtctctcctggctgcgcgcgctcctctccccgcttctccccctcccgcagcctcgccgccttggtgccttcctgcccggctcggccggcgctcgtccccggccccggccccgccagcccgggtctccgcgctcggagcagctcagccctgcagtggctcgggacccgatgctatgagagggaagcgagccgggcgcccagaccttcaggaggcgtcggatgcgcggcgggtcttgggaccgggctctctctccggctcgccttgccctcgggtgattatttggctccgctcatagccctgccttcctcggaggagccatcggtgtcgcgtgcgtgtggagtatctgcagacatgactgcgtggaggagattccagtcgctgctcctgcttctcgggctgctggtgctgtgcgcgaggctcctcactgcagcgaagg

SEQ ID NO: 258 - DNA, 217 bp, Homo sapiens
gtcagaactgtggaggcttagtccagggtcccaatggcactattgagagcccagggtttcctcacgggtatccgaactatgccaactgcacctggatcatcatcacgggcgagcgcaataggatacagttgtccttccatacctttgctcttgaagaagattttgatattttatcagtttacgatggacagcctcaacaagggaatttaaaagtgag

SEQ ID NO: 259 - DNA, 113 bp, Homo sapiens
attatcgggatttcagctgccctcctctatagtgagtacaggatctatcctcactctgtggttcacgacagacttcgctgtgagtgcccaaggtttcaaagcattatatgaag

SEQ ID NO: 260 - DNA, 195 bp, Homo sapiens
ttttacctagccacacttgtggaaatcctggagaaatcctgaaaggagttctgcatggaacgagattcaacataggagacaaaatccggtacagctgcctccctggctacatcttggaaggccacgccatcctgacctgcatcgtcagcccaggaaatggtgcatcgtgggacttcccagctcccttttgcagag

SEQ ID NO: 261 - DNA, 208 bp, Homo sapiens
ctgagggagcctgcggaggaaccttacgcgggaccagcagctccatctccagcccgcacttcccttcagagtacgagaacaacgcggactgcacctggaccattctggctgagcccggggacaccattgcgctggtcttcactgactttcagctagaagaaggatatgatttcttagagatcagtggcacggaagctccatccatatg

SEQ ID NO: 262 - DNA, 113 bp, Homo sapiens
gctaactggcatgaacctcccctctccagttatcagtagcaagaattggctacgactccatttcacctctgacagcaaccaccgacgcaaaggatttaacgctcagttccaag

SEQ ID NO: 263 - DNA, 78 bp, Homo sapiens
tgaaaaaggcgattgagttgaagtcaagaggagtcaagatgctgcccagcaaggatggaagccataaaaactctgtct

SEQ ID NO: 264 - DNA, 88 bp, Homo sapiens
tgagccaaggaggtgttgcattggtctctgacatgtgtccagatcctgggattccagaaaatggtagaagagcaggttccgacttcag

SEQ ID NO: 265 - DNA, 125 bp, Homo sapiens
ggttggtgcaaatgtacagttttcatgtgaggacaattacgtgctccagggatctaaaagcatcacctgtcagagagttacagagacgctcgctgcttggagtgaccacaggcccatctgccgag

SEQ ID NO: 266 - DNA, 122 bp, Homo sapiens
cgagaacatgtggatccaatctgcgtgggcccagcggcgtcattacctcccctaattatccggttcagtatgaagataatgcacactgtgtgtgggtcatcaccaccaccgacccggacaag

SEQ ID NO: 267 - DNA, 104 bp, Homo sapiens
gtcatcaagcttgcctttgaagagtttgagctggagcgaggctatgacaccctgacggttggtgatgctgggaaggtgggagacaccagatcggtcttgtacgt

SEQ ID NO: 268 - DNA, 113 bp, Homo sapiens
gctcacgggatccagtgttcctgacctcattgtgagcatgagcaaccagatgtggctacatctgcagtcggatgatagcattggctcacctgggtttaaagctgtttaccaag

SEQ ID NO: 269 - DNA, 183 bp, Homo sapiens
aaattgaaaagggagggtgtggggatcctggaatccccgcctatgggaagcggacgggcagcagtttcctccatggagatacactcacctttgaatgcccggcggcctttgagctggtgggggagagagttatcacctgtcagcagaacaatcagtggtctggcaacaagcccagctgtgtat

SEQ ID NO: 270 - DNA, 327 bp, Homo sapiens
tttcatgtttcttcaactttacggcatcatctgggattattctgtcaccaaattatccagaggaatatgggaacaacatgaactgtgtctggttgattatctcggagccaggaagtcgaattcacctaatctttaatgattttgatgttgagcctcagtttgactttctcgcggtcaaggatgatggcatttctgacataactgtcctgggtactttttctggcaatgaagtgccttcccagctggccagcagtgggcatatagttcgcttggaatttcagtctgaccattccactactggcagagggttcaacatcacttacacca

SEQ ID NO: 271 - DNA, 195 bp, Homo sapiens
catttggtcagaatgagtgccatgatcctggcattcctataaacggacgacgttttggtgacaggtttctactcgggagctcggtttctttccactgtgatgatggctttgtcaagacccagggatccgagtccattacctgcatactgcaagacgggaacgtggtctggagctccaccgtgccccgctgtgaag

SEQ ID NO: 272 - DNA, 139 bp, Homo sapiens
ctccatgtggtggacatctgacagcgtccagcggagtcattttgcctcctggatggccaggatattataaggattctttacattgtgaatggataattgaagcaaaaccaggccactctatcaaaataacttttgacag

SEQ ID NO: 273 - DNA, 188 bp, Homo sapiens
atttcagacagaggtcaattatgacaccttggaggtcagagatgggccagccagttcgtccccactgatcggcgagtaccacggcacccaggcaccccagttcctcatcagcaccgggaacttcatgtacctgctgttcaccactgacaacagccgctccagcatcggcttcctcatccactatgaga

SEQ ID NO: 274 - DNA, 189 bp, Homo sapiens
gtgtgacgcttgagtcggattcctgcctggacccgggcatccctgtgaacggccatcgccacggtggagactttggcatcaggtccacagtgactttcagctgtgacccggggtacacactaagtgacgacgagcccctcgtctgtgagaggaaccaccagtggaaccacgccttgcccagctgcgacg

SEQ ID NO: 275 - DNA, 117 bp, Homo sapiens
ctctatgtggaggctacatccaagggaagagtggaacagtcctttctcctgggtttccagatttttatccaaactctctaaactgcacgtggaccattgaagtgtctcatgggaaag

SEQ ID NO: 276 - DNA, 216 bp, Homo sapiens
gagttcaaatgatctttcacacctttcatcttgagagttcccacgactatttactgatcacagaggatggaagtttttccgagcccgttgccaggctcaccgggtcggtgttgcctcatacgatcaaggcaggcctgtttggaaacttcactgcccagcttcggtttatatcagacttctcaatttcgtacgagggcttcaatatcacattttcag

SEQ ID NO: 277 - DNA, 189 bp, Homo sapiens
aatatgacctggagccatgtgatgatcctggagtccctgccttcagccgaagaattggttttcactttggtgtgggagactctctgacgttttcctgcttcctgggatatcgtttagaaggtgccaccaagcttacctgcctgggtgggggccgccgtgtgtggagtgcacctctgccaaggtgtgtgg

SEQ ID NO: 278 - DNA, 170 bp, Homo sapiens
ccgaatgtggagcaagtgtcaaaggaaatgaaggaacattactgtctccaaattttccatccaattatgataataaccatgagtgtatctataaaatagaaacagaagccggcaagggcatccaccttagaacacgaagcttccagctgtttgaaggagatactctaaag

SEQ ID NO: 279 - DNA, 157 bp, Homo sapiens
gtatatgatggaaaagacagttcctcacgtccactgggcacgttcactaaaaatgaacttctggggctgatcctaaacagcacatccaatcacctgtggctagagttcaacaccaatggatctgacaccgaccaaggttttcaactcacctatacca

SEQ ID NO: 280 - DNA, 192 bp, Homo sapiens
gttttgatctggtaaaatgtgaggatccgggcatccctaactacggctataggatccgtgatgaaggccactttaccgacactgtagttctgtacagttgcaacccggggtacgccatgcatggcagcaacaccctgacctgtttgagtggagacaggagagtgtgggacaaaccactaccttcgtgcatag

SEQ ID NO: 281 - DNA, 10288 bp, Homo sapiens
gttttgatctggtaaaatgtgaggatccgggcatccctaactacggctataggatccgtgatgaaggccactttaccgacactgtagttctgtacagttgcaacccggggtacgccatgcatggcagcaacaccctgacctgtttgagtggagacaggagagtgtgggacaaaccactaccttcgtgcatagcggaatgtggtggtcagatccatgcagccacatcaggacgaatattgtcccctggctatccagctccgtatgacaacaacctccactgcacctggattatagaggcagacccaggaaagaccattagcctccatttcattgttttcgacacggagatggctcacgacatcctcaaggtctgggacgggccggtggacagtgacatcctgctgaaggagtggagtggctccgcccttccggaggacatccacagcaccttcaactcactcaccctgcagttcgacagcgacttcttcatcagcaagtctggcttctccatccagttctccacctcaattgcagccacctgtaacgatccaggtatgccccaaaatggcacccgctatggagacagcagagaggctggagacaccgtcacattccagtgtgaccctggctatcagctccaaggacaagccaaaatcacctgtgtgcagctgaataaccggttcttttggcaaccagaccctcctacatgcatagctgcttgtggagggaatctgacgggcccagcaggtgttattttgtcacccaactacccacagccgtatcctcctgggaaggaatgtgactggagagtaaaagtgaacccggactttgtcatcgccttgatattcaaaagtttcaacatggagcccagctatgacttcctacacatctatgaaggggaagattccaacagccccctcattgggagttaccagggctctcaggccccagaaagaatagagagtagcggaaacagcctgtttctggcatttcggagtgatgcctccgtgggcctttcagggttcgccattgaatttaaagagaaaccacgggaagcttgttttgacccaggaaatataatgaatgggacaagagttggaacagacttcaagcttggctccaccatcacctaccagtgtgactctggctataagattcttgacccctcatccatcacctgtgtgattggggctgatgggaaaccctcctgggaccaagtgctgccctcctgcaatgctccctgtggaggccagtacacgggatcagaaggggtagttttatcaccaaactacccccataattacacagctggtcaaatatgcctctattccatcacggtaccaaaggaattcgtggtctttggacagtttgcctatttccagacagccctgaatgatttggcagaattatttgatggaacccatgcacaggccagacttctcagctcactctcggggtctcactcaggggaaacattgcccttggctacgtcaaatcaaattctgctccgattcagtgcaaagagcggtgcctctgcccgcggcttccacttcgtgtatcaagctgttcctcgtaccagtgacacccaatgcagctctgtccccgagcccagatacggaaggagaattggttctgagttttctgccggctccatcgtccgattcgagtgcaacccgggatacctgcttcagggttccacggcgctccactgccagtccgtgcccaacgccttggcacagtggaacgacacgatccccagctgtgtggtaccctgcagtggcaatttcactcaacgaagaggtacaatcctgtcccccggctaccctgagccatacggaaacaacttgaactgtatatggaagatcatagttacggagggctcgggaattcagatccaagtgatcagttttgccacggagcagaactgggactcccttgagatccacgatggtggggatgtgaccgcacccagactgggaagcttctcaggcaccacagtaccggcactgctgaacagtacttccaaccaactctacctgcatttccagtctgacattagtgtggcagctgctggtttccacctggaatacaaaactgtaggtcttgctgcatgccaagaaccagccctccccagcaacagcatcaaaatcggagatcggtacatggtgaacgacgtgctctccttccagtgcgagcccgggtacaccctgcagggccgttcccacatttcctgtatgccagggaccgttcgccgttggaactatccgtctcccctgtgcattgcaacctgtggagggacgctgagcaccttgggtggtgtgatcctgagccccggcttcccaggttcttaccccaacaacttagactgcacctggaggatctcattacccatcggctatggtgcacatattcagtttctgaatttttctaccgaagctaatcatgacttccttgaaattcaaaatggaccttaccacaccagccccatgattggacaatttagcggcacggatctccccgcggccctgctgagcacaacgcatgaaaccctcatccacttttatagtgaccattcgcaaaaccggcaaggatttaaacttgcttaccaagcctatgaattacagaactgtccagatccacccccatttcagaatgggtacatgatcaactcggattacagcgtggggcaatcagtatctttcgagtgttatcctgggtacattctaataggccatcctgtcctcacttgtcagcatgggatcaacagaaactggaactacccttttccaagatgtgatgccccttgtgggtacaacgtaacttctcagaacggcaccatctactcccctggctttcctgatgagtatccgatcctgaaggactgcatttggctcatcacggtgcctccagggcacggagtttacatcaacttcaccctgttacagacggaagctgtcaacgattacattgctgtttgggacggtcccgatcagaactcaccccagctgggagttttcagtggcaacacagccctcgaaacggcgtatagctccaccaaccaagtcctgctcaagttccacagcgacttttcaaatggaggcttctttgtcctcaatttccacgcatttcagctcaagaaatgtcaacctcccccagcggttccacaggcagaaatgcttactgaggatgatgatttcgaaataggagattttgtgaagtaccagtgccaccccgggtacaccttggtggggaccgacattctgacttgcaagctcagttcccagttgcagtttgagggttctctcccaacatgtgaagcacaatgcccagcaaatgaagtccggactggatcatcgggagtcattctcagtccagggtatccgggtaattattttaactcccagacttgctcttggagtattaaagtggaaccaaactacaacattaccatctttgtggacacatttcaaagtgaaaagcagtttgatgcactggaagtgtttgatggttcttctgggcaaagtcctctgctagtagtcttaagtgggaatcatactgaacaatcaaattttacaagcaggagtaatcagttatatctccgctggtccactgaccatgccaccagtaagaaaggattcaagattcgctatgcagcaccttactgcagtttgacccaccccctgaagaatgggggtattctaaacaggactgcaggagcggttggaagcaaagtgcattatttttgcaagcctggataccgaatggtcggccacagcaatgcaacctgtagacgaaacccacttggcatgtaccagtgggactccctcacgccactctgccaggctgtgtcctgtggaatcccagaatccccaggaaacggttcatttaccgggaacgagttcactttggacagtaaagtggtctatgaatgtcatgagggcttcaagcttgaatccagccagcaagcaacagccgtgtgtcaagaagatgggttgtggagtaacaaggggaagccgcccacgtgtaagccggtcgcttgccccagcattgaagctcagctctcagaacatgtcatctggaggctggtttcaggatccttgaatgagtacggtgctcaagtattgctgagctgcagtcctggttactacttagaaggctggaggctcctgcggtgccaggccaatgggacgtggaacataggagatgagaggccaagctgtcgagttatctcgtgtggaagcctttcctttcccccaaatggcaacaagattggaacgttgacagtttatggggccacagctatatttacgtgcaacaccggctacacgcttgtggggtctcatgtcagagagtgcttggcaaatgggctctggagcggcagcgaaactcgatgtctggctggccactgcggttccccagacccgattgtgaacggtcacattagtggagatggcttcagttacagagacacggtggtttaccagtgcaatcctggtttccggcttgtgggaacttccgtgaggatatgcctgcaagaccacaagtggtctggacaaacgcctgtctgtgtccccatcacatgtggtcaccctggaaaccctgcccacggattcactaatggcagtgagttcaacctgaatgatgtcgtgaatttcacctgcaacacgggctatttgctgcagggcgtgtctcgagcccagtgtcggagcaacggccagtggagtagccctctgcccacgtgtcgagtggtgaactgttctgatccaggctttgtggaaaatgccattcgtcacgggcaacagaacttccctgagagttttgagtatggaatgagtatcctgtaccattgcaagaagggattttacttgctgggatcttcagccttgacctgtatggcaaatggcttatgggaccgatccctgcccaagtgtttggctatatcgtgtggacacccaggggtccctgccaacgccgtcctcactggagagctgtttacctatggcgccgtcgtgcactactcctgcagagggagcgagagcctcataggcaacgacacgagagtgtgccaggaagacagtcactggagcggggcactgccccactgcacaggaaataatcctggattctgtggtgatccggggaccccagcacatgggtctcggcttggtgatgactttaagacaaagagtcttctccgcttctcctgtgaaatggggcaccagctgaggggctcccctgaacgcacgtgtttgctcaatgggtcatggtcaggactgcagccggtgtgtgaggccgtgtcctgtggcaaccctggcacacccaccaacggaatgattgtcagtagtgatggcattctgttctccagctcggtcatctatgcctgctgggaaggctacaagacctcagggctcatgacacggcattgcacagccaatgggacctggacaggcactgctcccgactgcacaattataagttgtggggatccaggcacactagcaaatggcatccagtttgggaccgacttcaccttcaacaagactgtgagctatcagtgtaacccaggctatgtcatggaagcagtcacatccgccactattcgctgtaccaaagacggcaggtggaatccgagcaaacctgtctgcaaagccgtgctgtgtcctcagccgccgccggtgcagaatggaacagtggagggaagtgatttccgctggggctccagcataagttacagctgcatggacggttaccagctctctcactccgccatcctctcctgtgaaggtcgcggggtgtggaaaggagagatcccccagtgtctccctgtgttctgcggagaccctggcatccccgcagaagggcgacttagtgggaaaagtttcacctataagtccgaagtcttcttccagtgcaaatctccatttatactcgtgggatcctccagaagagtctgccaagctgacggcacgtggagcggcatacaacccacctgcattgatcctgctcataacacctgcccagaccctggtacgccacactttggaatacagaatagctccagaggctatgaggttggaagcacggtttttttcaggtgcagaaaaggctaccatattcaaggttccacgactcgcacctgccttgccaatttaacatggagtgggatacagaccgaatgtatacctcatgcctgcagacagccagaaaccccggcacacgcggatgtgagagccatcgatcttcctactttcggctacaccttagtgtacacctgccatccaggctttttcctcgcagggggatctgagcacagaacatgtaaagcagacatgaaatggacaggaaagtcgcctgtgtgtaaaagtaaaggagtgagagaagttaatgaaacagttactaaaactccagttccttcagatgtctttttcgtcaattcactgtggaaggggtattatgaatatttagggaaaagacaacccgccactctaactgttgactggttcaatgcaacaagcagtaaggtgaatgccaccttcagcgaagcctcgccagtggagctgaagttgacaggcatttacaagaaggaggaggcccacttactcctgaaagcttttcaaattaaaggccaggcagatatttttgtaagcaagttcgaaaatgacaactggggactagatggttatgtgtcatctggacttgaaagaggaggatttacttttcaaggtgacattcatggaaaagactttggaaaatttaagctagaaaggcaagatcctttaaacccagatcaagactcttccagtcattaccacggcaccagcagtggctctgtggcggctgccattctggttcctttctttgctctaattttatcagggtttgcattttacctctacaaacacagaacgagaccaaaagttcaatacaatggctatgctgggcatgaaaacagcaatggacaagcatcgtttgaaaaccccatgtatgatacaaacttaaaacccacagaagccaaggctgtgaggtttgacacaactctgaacacagtctgtacagtggtatagccctcagtgccccaacaggactgattcatagccatacctctgatggacaagcagtgattcctttggtgccatataccactctcccttccactctggctttactgcagcgatcttcaaccttgtctactggcataagtgcagcggggatctctactcaaatgtgtcagggtcttctacggatcaaactacacatgcgttttcattccaaaagtgggttctaaatgcctggctgcatctgtatgaaatcaaggcacactccaggaagactgccacgtcgcgccaacacgtcatactcaatgcctcagactttcatatttctgtgttgctgagatgcctttcaatgcaatcgtctgggctcgtggatatgtccctcaggtgcggtgacagaatggtggcaccacgatatgtgttctcttgtgttgtttttcctttttaaacccccatgaacacgaatactctgaaaaaaataaaaagctttctggaagaagacacctttctgatagaggctcacacctacaaatgcttcactctgtccttccgagacctgacaagctttgaggacctcacagctcccctgtgtgttcatctctagggatgtttgcaatttcccagtcagctgttctgtcgcagaatgtttaatgcacaattttttgcactagtgtgttatgaatgactaagattctgataaaaaaaataaattatttacacagggtttatacacactatccattgtatataagcattatttcatattatcaagctaaacattcccccatcagcttagttggagtgttagggaaaagtattcctagatatggcacagattttaaaaggaaatacagtattgaagagatttattttattattgcttcaattagctccatttacgtgttgaattcattgaagaggtccaatgagaaaaaaacagaagcctccttatttcacacgttttcctcctttagtaccatcctcatccaattactgtctctctgatactacttaatagcagggggtttgcagaaatttctgtttgccatgtaaaactgtgaatagtaatttattttagatagtcgatgaacttgtgggttttagctcacaatgcagccttcccttttgcagtgttttttttttgtttttttttttttttgtcttttactgtgccatcgatctttgatattgcattgaaagacaatataccacagtagcaccttgaactcagtgaaaattgttcaggatcaaaataccaagtgttcttttagagggaaggaaaaagtacacacactctcctctcacaatgatatattttatacattcatttgttatttgtttcatgctttatgattccagatggaaaggtaatttcagtgacttttcaagtttaaattccattataggtaaatgataagttatgatgcaaataaaatctataagatccccagggcaaataaaaatcaaaacatgaagtagaagatgtggccgtgaggtagtttatgtaacaaattcaaagtgaaaatcatgtttacttttacttatacttatttgataaaaatatttttgaaacgatagtacttattttattatttgatatttcagttcctattcaattgtggcagattttctctgtttcacattttagattggcgttggtaatagaaatgtcagaatgttcaaattggccttcacgttgtcggagtgaacacattgacacctagctttaagactgatttatctgttggtgtactgaaggtttccatgtaggacttcaaatgtggaaaaggaaaagcagtcaggaaaatggggcattctttggagagtcacgcgttttgattcggacatttccgtagagctcggctcccagtgttgtgttcctcggtcgaaagggtctctgctgtttggggactcactggcctctcctagggactcctttgtcttgtgaaccccacgctgttggattctgtatcattatgctgaattctctgcacagttttccctggccaacctgcccacatccttggagatttgctttgccagtgggaatccttacattgctgtttcacagtagacgggacgaggtcagcgggagtcgtgctcctaacacacacattgaacgaaacagaagatgattgaaagtgtgaggaggctcgtgtgcaagggagaacagggttactatacatattagtgtatatatatacatacatatatatatatatatattgtacatatctaagtttgagtcattcaaactaggtgcaaaatgctgacttcagagtctgaattaacatctctgttcccatatccctgacctgctccctggtcaacgatgctatgaaatcctgaaatgacaggacatacatacatacaagaaaccacatatcaaattagatatgattttcctttgtgtgcaaagtcaaactgtcctagggttgccagtttgaagcatgttatttaaatgaaaaaaaaaatcagtgaaattctcgtgtgagaattctgcctagtttcttcctaaggttgtgtgcagtgttgaacggcgtctccgcaaggtgttggaggatctcattttagggcagtcaggagctgtgcttgctgagttaggtctagaagactcttccctgaaggcaacgggaacacgcgtgagggacgcgaccacacactaacagaggacacgtgcttcagagctgtttaaaactgctgcttgttttacacacacatcttgccttttttcaggctagctgcaataatttttttcttctgtaaaatattttgtaaacaacaacaaaaagctattataaaaagggggtaaaaaaaagaacgctggcattatgatcaggaaaacccattgtcatcgccgaccctccctcccgtcccaccacacgctgctgtcacgacgtaggtgcgaaagacctttttgtacagagatatattttttatgaagaatttgtaaaattattaaatatgctgtaattttttgattaatgtaggtacattgttaaaaaataaatgtttttacaatacagaactgtaattttcccaataatgtaaaatgtaccatctctagctgattttcagttccaatcctattacacatgtattaatattaaagtggcctgttaaaatgaacagtatcttttttttgtcaaaaaaattataaagagggtgtaatatagcctgtgcaatgccaccaatctttaaagcaaatcagagttctaattaaatatttaatttta

SEQ ID NO: 282 - DNA, 14417 bp, Homo sapiens
ctccacggcagcggctccttgtgccactagcagcccttcttctgcgctctccgccttttctctctagactggatctctcctcccccccgcgcccccctccccgcatctcccactcgctggctctctctccagctgcctcctctccaggtctctcctggctgcgcgcgctcctctccccgcttctccccctcccgcagcctcgccgccttggtgccttcctgcccggctcggccggcgctcgtccccggccccggccccgccagcccgggtctccgcgctcggagcagctcagccctgcagtggctcgggacccgatgctatgagagggaagcgagccgggcgcccagaccttcaggaggcgtcggatgcgcggcgggtcttgggaccgggctctctctccggctcgccttgccctcgggtgattatttggctccgctcatagccctgccttcctcggaggagccatcggtgtcgcgtgcgtgtggagtatctgcagacatgactgcgtggaggagattccagtcgctgctcctgcttctcgggctgctggtgctgtgcgcgaggctcctcactgcagcgaagggtcagaactgtggaggcttagtccagggtcccaatggcactattgagagcccagggtttcctcacgggtatccgaactatgccaactgcacctggatcatcatcacgggcgagcgcaataggatacagttgtccttccatacctttgctcttgaagaagattttgatattttatcagtttacgatggacagcctcaacaagggaatttaaaagtgagattatcgggatttcagctgccctcctctatagtgagtacaggatctatcctcactctgtggttcacgacagacttcgctgtgagtgcccaaggtttcaaagcattatatgaagttttacctagccacacttgtggaaatcctggagaaatcctgaaaggagttctgcatggaacgagattcaacataggagacaaaatccggtacagctgcctccctggctacatcttggaaggccacgccatcctgacctgcatcgtcagcccaggaaatggtgcatcgtgggacttcccagctcccttttgcagagctgagggagcctgcggaggaaccttacgcgggaccagcagctccatctccagcccgcacttcccttcagagtacgagaacaacgcggactgcacctggaccattctggctgagcccggggacaccattgcgctggtcttcactgactttcagctagaagaaggatatgatttcttagagatcagtggcacggaagctccatccatatggctaactggcatgaacctcccctctccagttatcagtagcaagaattggctacgactccatttcacctctgacagcaaccaccgacgcaaaggatttaacgctcagttccaagtgaaaaaggcgattgagttgaagtcaagaggagtcaagatgctgcccagcaaggatggaagccataaaaactctgtcttgagccaaggaggtgttgcattggtctctgacatgtgtccagatcctgggattccagaaaatggtagaagagcaggttccgacttcagggttggtgcaaatgtacagttttcatgtgaggacaattacgtgctccagggatctaaaagcatcacctgtcagagagttacagagacgctcgctgcttggagtgaccacaggcccatctgccgagcgagaacatgtggatccaatctgcgtgggcccagcggcgtcattacctcccctaattatccggttcagtatgaagataatgcacactgtgtgtgggtcatcaccaccaccgacccggacaaggtcatcaagcttgcctttgaagagtttgagctggagcgaggctatgacaccctgacggttggtgatgctgggaaggtgggagacaccagatcggtcttgtacgtgctcacgggatccagtgttcctgacctcattgtgagcatgagcaaccagatgtggctacatctgcagtcggatgatagcattggctcacctgggtttaaagctgtttaccaagaaattgaaaagggagggtgtggggatcctggaatccccgcctatgggaagcggacgggcagcagtttcctccatggagatacactcacctttgaatgcccggcggcctttgagctggtgggggagagagttatcacctgtcagcagaacaatcagtggtctggcaacaagcccagctgtgtattttcatgtttcttcaactttacggcatcatctgggattattctgtcaccaaattatccagaggaatatgggaacaacatgaactgtgtctggttgattatctcggagccaggaagtcgaattcacctaatctttaatgattttgatgttgagcctcagtttgactttctcgcggtcaaggatgatggcatttctgacataactgtcctgggtactttttctggcaatgaagtgccttcccagctggccagcagtgggcatatagttcgcttggaatttcagtctgaccattccactactggcagagggttcaacatcacttacaccacatttggtcagaatgagtgccatgatcctggcattcctataaacggacgacgttttggtgacaggtttctactcgggagctcggtttctttccactgtgatgatggctttgtcaagacccagggatccgagtccattacctgcatactgcaagacgggaacgtggtctggagctccaccgtgccccgctgtgaagctccatgtggtggacatctgacagcgtccagcggagtcattttgcctcctggatggccaggatattataaggattctttacattgtgaatggataattgaagcaaaaccaggccactctatcaaaataacttttgacagatttcagacagaggtcaattatgacaccttggaggtcagagatgggccagccagttcgtccccactgatcggcgagtaccacggcacccaggcaccccagttcctcatcagcaccgggaacttcatgtacctgctgttcaccactgacaacagccgctccagcatcggcttcctcatccactatgagagtgtgacgcttgagtcggattcctgcctggacccgggcatccctgtgaacggccatcgccacggtggagactttggcatcaggtccacagtgactttcagctgtgacccggggtacacactaagtgacgacgagcccctcgtctgtgagaggaaccaccagtggaaccacgccttgcccagctgcgacgctctatgtggaggctacatccaagggaagagtggaacagtcctttctcctgggtttccagatttttatccaaactctctaaactgcacgtggaccattgaagtgtctcatgggaaaggagttcaaatgatctttcacacctttcatcttgagagttcccacgactatttactgatcacagaggatggaagtttttccgagcccgttgccaggctcaccgggtcggtgttgcctcatacgatcaaggcaggcctgtttggaaacttcactgcccagcttcggtttatatcagacttctcaatttcgtacgagggcttcaatatcacattttcagaatatgacctggagccatgtgatgatcctggagtccctgccttcagccgaagaattggttttcactttggtgtgggagactctctgacgttttcctgcttcctgggatatcgtttagaaggtgccaccaagcttacctgcctgggtgggggccgccgtgtgtggagtgcacctctgccaaggtgtgtggccgaatgtggagcaagtgtcaaaggaaatgaaggaacattactgtctccaaattttccatccaattatgataataaccatgagtgtatctataaaatagaaacagaagccggcaagggcatccaccttagaacacgaagcttccagctgtttgaaggagatactctaaaggtatatgatggaaaagacagttcctcacgtccactgggcacgttcactaaaaatgaacttctggggctgatcctaaacagcacatccaatcacctgtggctagagttcaacaccaatggatctgacaccgaccaaggttttcaactcacctataccagttttgatctggtaaaatgtgaggatccgggcatccctaactacggctataggatccgtgatgaaggccactttaccgacactgtagttctgtacagttgcaacccggggtacgccatgcatggcagcaacaccctgacctgtttgagtggagacaggagagtgtgggacaaaccactaccttcgtgcatagcggaatgtggtggtcagatccatgcagccacatcaggacgaatattgtcccctggctatccagctccgtatgacaacaacctccactgcacctggattatagaggcagacccaggaaagaccattagcctccatttcattgttttcgacacggagatggctcacgacatcctcaaggtctgggacgggccggtggacagtgacatcctgctgaaggagtggagtggctccgcccttccggaggacatccacagcaccttcaactcactcaccctgcagttcgacagcgacttcttcatcagcaagtctggcttctccatccagttctccacctcaattgcagccacctgtaacgatccaggtatgccccaaaatggcacccgctatggagacagcagagaggctggagacaccgtcacattccagtgtgaccctggctatcagctccaaggacaagccaaaatcacctgtgtgcagctgaataaccggttcttttggcaaccagaccctcctacatgcatagctgcttgtggagggaatctgacgggcccagcaggtgttattttgtcacccaactacccacagccgtatcctcctgggaaggaatgtgactggagagtaaaagtgaacccggactttgtcatcgccttgatattcaaaagtttcaacatggagcccagctatgacttcctacacatctatgaaggggaagattccaacagccccctcattgggagttaccagggctctcaggccccagaaagaatagagagtagcggaaacagcctgtttctggcatttcggagtgatgcctccgtgggcctttcagggttcgccattgaatttaaagagaaaccacgggaagcttgttttgacccaggaaatataatgaatgggacaagagttggaacagacttcaagcttggctccaccatcacctaccagtgtgactctggctataagattcttgacccctcatccatcacctgtgtgattggggctgatgggaaaccctcctgggaccaagtgctgccctcctgcaatgctccctgtggaggccagtacacgggatcagaaggggtagttttatcaccaaactacccccataattacacagctggtcaaatatgcctctattccatcacggtaccaaaggaattcgtggtctttggacagtttgcctatttccagacagccctgaatgatttggcagaattatttgatggaacccatgcacaggccagacttctcagctcactctcggggtctcactcaggggaaacattgcccttggctacgtcaaatcaaattctgctccgattcagtgcaaagagcggtgcctctgcccgcggcttccacttcgtgtatcaagctgttcctcgtaccagtgacacccaatgcagctctgtccccgagcccagatacggaaggagaattggttctgagttttctgccggctccatcgtccgattcgagtgcaacccgggatacctgcttcagggttccacggcgctccactgccagtccgtgcccaacgccttggcacagtggaacgacacgatccccagctgtgtggtaccctgcagtggcaatttcactcaacgaagaggtacaatcctgtcccccggctaccctgagccatacggaaacaacttgaactgtatatggaagatcatagttacggagggctcgggaattcagatccaagtgatcagttttgccacggagcagaactgggactcccttgagatccacgatggtggggatgtgaccgcacccagactgggaagcttctcaggcaccacagtaccggcactgctgaacagtacttccaaccaactctacctgcatttccagtctgacattagtgtggcagctgctggtttccacctggaatacaaaactgtaggtcttgctgcatgccaagaaccagccctccccagcaacagcatcaaaatcggagatcggtacatggtgaacgacgtgctctccttccagtgcgagcccgggtacaccctgcagggccgttcccacatttcctgtatgccagggaccgttcgccgttggaactatccgtctcccctgtgcattgcaacctgtggagggacgctgagcaccttgggtggtgtgatcctgagccccggcttcccaggttcttaccccaacaacttagactgcacctggaggatctcattacccatcggctatggtgcacatattcagtttctgaatttttctaccgaagctaatcatgacttccttgaaattcaaaatggaccttaccacaccagccccatgattggacaatttagcggcacggatctccccgcggccctgctgagcacaacgcatgaaaccctcatccacttttatagtgaccattcgcaaaaccggcaaggatttaaacttgcttaccaagcctatgaattacagaactgtccagatccacccccatttcagaatgggtacatgatcaactcggattacagcgtggggcaatcagtatctttcgagtgttatcctgggtacattctaataggccatcctgtcctcacttgtcagcatgggatcaacagaaactggaactacccttttccaagatgtgatgccccttgtgggtacaacgtaacttctcagaacggcaccatctactcccctggctttcctgatgagtatccgatcctgaaggactgcatttggctcatcacggtgcctccagggcacggagtttacatcaacttcaccctgttacagacggaagctgtcaacgattacattgctgtttgggacggtcccgatcagaactcaccccagctgggagttttcagtggcaacacagccctcgaaacggcgtatagctccaccaaccaagtcctgctcaagttccacagcgacttttcaaatggaggcttctttgtcctcaatttccacgcatttcagctcaagaaatgtcaacctcccccagcggttccacaggcagaaatgcttactgaggatgatgatttcgaaataggagattttgtgaagtaccagtgccaccccgggtacaccttggtggggaccgacattctgacttgcaagctcagttcccagttgcagtttgagggttctctcccaacatgtgaagcacaatgcccagcaaatgaagtccggactggatcatcgggagtcattctcagtccagggtatccgggtaattattttaactcccagacttgctcttggagtattaaagtggaaccaaactacaacattaccatctttgtggacacatttcaaagtgaaaagcagtttgatgcactggaagtgtttgatggttcttctgggcaaagtcctctgctagtagtcttaagtgggaatcatactgaacaatcaaattttacaagcaggagtaatcagttatatctccgctggtccactgaccatgccaccagtaagaaaggattcaagattcgctatgcagcaccttactgcagtttgacccaccccctgaagaatgggggtattctaaacaggactgcaggagcggttggaagcaaagtgcattatttttgcaagcctggataccgaatggtcggccacagcaatgcaacctgtagacgaaacccacttggcatgtaccagtgggactccctcacgccactctgccaggctgtgtcctgtggaatcccagaatccccaggaaacggttcatttaccgggaacgagttcactttggacagtaaagtggtctatgaatgtcatgagggcttcaagcttgaatccagccagcaagcaacagccgtgtgtcaagaagatgggttgtggagtaacaaggggaagccgcccacgtgtaagccggtcgcttgccccagcattgaagctcagctctcagaacatgtcatctggaggctggtttcaggatccttgaatgagtacggtgctcaagtattgctgagctgcagtcctggttactacttagaaggctggaggctcctgcggtgccaggccaatgggacgtggaacataggagatgagaggccaagctgtcgagttatctcgtgtggaagcctttcctttcccccaaatggcaacaagattggaacgttgacagtttatggggccacagctatatttacgtgcaacaccggctacacgcttgtggggtctcatgtcagagagtgcttggcaaatgggctctggagcggcagcgaaactcgatgtctggctggccactgcggttccccagacccgattgtgaacggtcacattagtggagatggcttcagttacagagacacggtggtttaccagtgcaatcctggtttccggcttgtgggaacttccgtgaggatatgcctgcaagaccacaagtggtctggacaaacgcctgtctgtgtccccatcacatgtggtcaccctggaaaccctgcccacggattcactaatggcagtgagttcaacctgaatgatgtcgtgaatttcacctgcaacacgggctatttgctgcagggcgtgtctcgagcccagtgtcggagcaacggccagtggagtagccctctgcccacgtgtcgagtggtgaactgttctgatccaggctttgtggaaaatgccattcgtcacgggcaacagaacttccctgagagttttgagtatggaatgagtatcctgtaccattgcaagaagggattttacttgctgggatcttcagccttgacctgtatggcaaatggcttatgggaccgatccctgcccaagtgtttggctatatcgtgtggacacccaggggtccctgccaacgccgtcctcactggagagctgtttacctatggcgccgtcgtgcactactcctgcagagggagcgagagcctcataggcaacgacacgagagtgtgccaggaagacagtcactggagcggggcactgccccactgcacaggaaataatcctggattctgtggtgatccggggaccccagcacatgggtctcggcttggtgatgactttaagacaaagagtcttctccgcttctcctgtgaaatggggcaccagctgaggggctcccctgaacgcacgtgtttgctcaatgggtcatggtcaggactgcagccggtgtgtgaggccgtgtcctgtggcaaccctggcacacccaccaacggaatgattgtcagtagtgatggcattctgttctccagctcggtcatctatgcctgctgggaaggctacaagacctcagggctcatgacacggcattgcacagccaatgggacctggacaggcactgctcccgactgcacaattataagttgtggggatccaggcacactagcaaatggcatccagtttgggaccgacttcaccttcaacaagactgtgagctatcagtgtaacccaggctatgtcatggaagcagtcacatccgccactattcgctgtaccaaagacggcaggtggaatccgagcaaacctgtctgcaaagccgtgctgtgtcctcagccgccgccggtgcagaatggaacagtggagggaagtgatttccgctggggctccagcataagttacagctgcatggacggttaccagctctctcactccgccatcctctcctgtgaaggtcgcggggtgtggaaaggagagatcccccagtgtctccctgtgttctgcggagaccctggcatccccgcagaagggcgacttagtgggaaaagtttcacctataagtccgaagtcttcttccagtgcaaatctccatttatactcgtgggatcctccagaagagtctgccaagctgacggcacgtggagcggcatacaacccacctgcattgatcctgctcataacacctgcccagaccctggtacgccacactttggaatacagaatagctccagaggctatgaggttggaagcacggtttttttcaggtgcagaaaaggctaccatattcaaggttccacgactcgcacctgccttgccaatttaacatggagtgggatacagaccgaatgtatacctcatgcctgcagacagccagaaaccccggcacacgcggatgtgagagccatcgatcttcctactttcggctacaccttagtgtacacctgccatccaggctttttcctcgcagggggatctgagcacagaacatgtaaagcagacatgaaatggacaggaaagtcgcctgtgtgtaaaagtaaaggagtgagagaagttaatgaaacagttactaaaactccagttccttcagatgtctttttcgtcaattcactgtggaaggggtattatgaatatttagggaaaagacaacccgccactctaactgttgactggttcaatgcaacaagcagtaaggtgaatgccaccttcagcgaagcctcgccagtggagctgaagttgacaggcatttacaagaaggaggaggcccacttactcctgaaagcttttcaaattaaaggccaggcagatatttttgtaagcaagttcgaaaatgacaactggggactagatggttatgtgtcatctggacttgaaagaggaggatttacttttcaaggtgacattcatggaaaagactttggaaaatttaagctagaaaggcaagatcctttaaacccagatcaagactcttccagtcattaccacggcaccagcagtggctctgtggcggctgccattctggttcctttctttgctctaattttatcagggtttgcattttacctctacaaacacagaacgagaccaaaagttcaatacaatggctatgctgggcatgaaaacagcaatggacaagcatcgtttgaaaaccccatgtatgatacaaacttaaaacccacagaagccaaggctgtgaggtttgacacaactctgaacacagtctgtacagtggtatagccctcagtgccccaacaggactgattcatagccatacctctgatggacaagcagtgattcctttggtgccatataccactctcccttccactctggctttactgcagcgatcttcaaccttgtctactggcataagtgcagcggggatctctactcaaatgtgtcagggtcttctacggatcaaactacacatgcgttttcattccaaaagtgggttctaaatgcctggctgcatctgtatgaaatcaaggcacactccaggaagactgccacgtcgcgccaacacgtcatactcaatgcctcagactttcatatttctgtgttgctgagatgcctttcaatgcaatcgtctgggctcgtggatatgtccctcaggtgcggtgacagaatggtggcaccacgatatgtgttctcttgtgttgtttttcctttttaaacccccatgaacacgaatactctgaaaaaaataaaaagctttctggaagaagacacctttctgatagaggctcacacctacaaatgcttcactctgtccttccgagacctgacaagctttgaggacctcacagctcccctgtgtgttcatctctagggatgtttgcaatttcccagtcagctgttctgtcgcagaatgtttaatgcacaattttttgcactagtgtgttatgaatgactaagattctgataaaaaaaataaattatttacacagggtttatacacactatccattgtatataagcattatttcatattatcaagctaaacattcccccatcagcttagttggagtgttagggaaaagtattcctagatatggcacagattttaaaaggaaatacagtattgaagagatttattttattattgcttcaattagctccatttacgtgttgaattcattgaagaggtccaatgagaaaaaaacagaagcctccttatttcacacgttttcctcctttagtaccatcctcatccaattactgtctctctgatactacttaatagcagggggtttgcagaaatttctgtttgccatgtaaaactgtgaatagtaatttattttagatagtcgatgaacttgtgggttttagctcacaatgcagccttcccttttgcagtgttttttttttgtttttttttttttttgtcttttactgtgccatcgatctttgatattgcattgaaagacaatataccacagtagcaccttgaactcagtgaaaattgttcaggatcaaaataccaagtgttcttttagagggaaggaaaaagtacacacactctcctctcacaatgatatattttatacattcatttgttatttgtttcatgctttatgattccagatggaaaggtaatttcagtgacttttcaagtttaaattccattataggtaaatgataagttatgatgcaaataaaatctataagatccccagggcaaataaaaatcaaaacatgaagtagaagatgtggccgtgaggtagtttatgtaacaaattcaaagtgaaaatcatgtttacttttacttatacttatttgataaaaatatttttgaaacgatagtacttattttattatttgatatttcagttcctattcaattgtggcagattttctctgtttcacattttagattggcgttggtaatagaaatgtcagaatgttcaaattggccttcacgttgtcggagtgaacacattgacacctagctttaagactgatttatctgttggtgtactgaaggtttccatgtaggacttcaaatgtggaaaaggaaaagcagtcaggaaaatggggcattctttggagagtcacgcgttttgattcggacatttccgtagagctcggctcccagtgttgtgttcctcggtcgaaagggtctctgctgtttggggactcactggcctctcctagggactcctttgtcttgtgaaccccacgctgttggattctgtatcattatgctgaattctctgcacagttttccctggccaacctgcccacatccttggagatttgctttgccagtgggaatccttacattgctgtttcacagtagacgggacgaggtcagcgggagtcgtgctcctaacacacacattgaacgaaacagaagatgattgaaagtgtgaggaggctcgtgtgcaagggagaacagggttactatacatattagtgtatatatatacatacatatatatatatatatattgtacatatctaagtttgagtcattcaaactaggtgcaaaatgctgacttcagagtctgaattaacatctctgttcccatatccctgacctgctccctggtcaacgatgctatgaaatcctgaaatgacaggacatacatacatacaagaaaccacatatcaaattagatatgattttcctttgtgtgcaaagtcaaactgtcctagggttgccagtttgaagcatgttatttaaatgaaaaaaaaaatcagtgaaattctcgtgtgagaattctgcctagtttcttcctaaggttgtgtgcagtgttgaacggcgtctccgcaaggtgttggaggatctcattttagggcagtcaggagctgtgcttgctgagttaggtctagaagactcttccctgaaggcaacgggaacacgcgtgagggacgcgaccacacactaacagaggacacgtgcttcagagctgtttaaaactgctgcttgttttacacacacatcttgccttttttcaggctagctgcaataatttttttcttctgtaaaatattttgtaaacaacaacaaaaagctattataaaaagggggtaaaaaaaagaacgctggcattatgatcaggaaaacccattgtcatcgccgaccctccctcccgtcccaccacacgctgctgtcacgacgtaggtgcgaaagacctttttgtacagagatatattttttatgaagaatttgtaaaattattaaatatgctgtaattttttgattaatgtaggtacattgttaaaaaataaatgtttttacaatacagaactgtaattttcccaataatgtaaaatgtaccatctctagctgattttcagttccaatcctattacacatgtattaatattaaagtggcctgttaaaatgaacagtatcttttttttgtcaaaaaaattataaagagggtgtaatatagcctgtgcaatgccaccaatctttaaagcaaatcagagttctaattaaatatttaatttta

SEQ ID NO: 283 - protein, 28 aa, Homo sapiens
MTAWRRFQSLLLLLGLLVLCARLLTAAK

SEQ ID NO: 284 - protein, 71 aa, Homo sapiens
QNCGGLVQGPNGTIESPGFPHGYPNYANCTWIIITGERNRIQLSFHTFALEEDFDILSVYDGQPQQGNLKV

SEQ ID NO: 285 - protein, 37 aa, Homo sapiens
LSGFQLPSSIVSTGSILTLWFTTDFAVSAQGFKALYE

SEQ ID NO: 286 - protein, 64 aa, Homo sapiens
LPSHTCGNPGEILKGVLHGTRFNIGDKIRYSCLPGYILEGHAILTCIVSPGNGASWDFPAPFCR

SEQ ID NO: 287 - protein, 68 aa, Homo sapiens
EGACGGTLRGTSSSISSPHFPSEYENNADCTWTILAEPGDTIALVFTDFQLEEGYDFLEISGTEAPSI

SEQ ID NO: 288 - protein, 37 aa, Homo sapiens
LTGMNLPSPVISSKNWLRLHFTSDSNHRRKGFNAQFQ

SEQ ID NO: 289 - protein, 25 aa, Homo sapiens
KKAIELKSRGVKMLPSKDGSHKNSV

SEQ ID NO: 290 - protein, 28 aa, Homo sapiens
SQGGVALVSDMCPDPGIPENGRRAGSDF

SEQ ID NO: 291 - protein, 41 aa, Homo sapiens
VGANVQFSCEDNYVLQGSKSITCQRVTETLAAWSDHRPICR

SEQ ID NO: 292 - protein, 40 aa, Homo sapiens
RTCGSNLRGPSGVITSPNYPVQYEDNAHCVWVITTTDPDK

SEQ ID NO: 293 - protein, 34 aa, Homo sapiens
VIKLAFEEFELERGYDTLTVGDAGKVGDTRSVLY

SEQ ID NO: 294 - protein, 37 aa, Homo sapiens
LTGSSVPDLIVSMSNQMWLHLQSDDSIGSPGFKAVYQ

SEQ ID NO: 295 - protein, 60 aa, Homo sapiens
IEKGGCGDPGIPAYGKRTGSSFLHGDTLTFECPAAFELVGERVITCQQNNQWSGNKPSCV

SEQ ID NO: 296 - protein, 108 aa, Homo sapiens
SCFFNFTASSGIILSPNYPEEYGNNMNCVWLIISEPGSRIHLIFNDFDVEPQFDFLAVKDDGISDITVLGTFSGNEVPSQLASSGHIVRLEFQSDHSTTGRGFNITYT

SEQ ID NO: 297 - protein, 64 aa, Homo sapiens
FGQNECHDPGIPINGRRFGDRFLLGSSVSFHCDDGFVKTQGSESITCILQDGNVVWSSTVPRCE

SEQ ID NO: 298 - protein, 45 aa, Homo sapiens
PCGGHLTASSGVILPPGWPGYYKDSLHCEWIIEAKPGHSIKITFD

SEQ ID NO: 299 - protein, 62 aa, Homo sapiens
FQTEVNYDTLEVRDGPASSSPLIGEYHGTQAPQFLISTGNFMYLLFTTDNSRSSIGFLIHYE

SEQ ID NO: 300 - protein, 62 aa, Homo sapiens
VTLESDSCLDPGIPVNGHRHGGDFGIRSTVTFSCDPGYTLSDDEPLVCERNHQWNHALPSCD

SEQ ID NO: 301 - protein, 38 aa, Homo sapiens
LCGGYIQGKSGTVLSPGFPDFYPNSLNCTWTIEVSHGK

SEQ ID NO: 302 - protein, 71 aa, Homo sapiens
VQMIFHTFHLESSHDYLLITEDGSFSEPVARLTGSVLPHTIKAGLFGNFTAQLRFISDFSISYEGFNITFS

SEQ ID NO: 303 - protein, 62 aa, Homo sapiens
YDLEPCDDPGVPAFSRRIGFHFGVGDSLTFSCFLGYRLEGATKLTCLGGGRRVWSAPLPRCV

SEQ ID NO: 304 - protein, 56 aa, Homo sapiens
ECGASVKGNEGTLLSPNFPSNYDNNHECIYKIETEAGKGIHLRTRSFQLFEGDTLK

SEQ ID NO: 305 - protein, 52 aa, Homo sapiens
VYDGKDSSSRPLGTFTKNELLGLILNSTSNHLWLEFNTNGSDTDQGFQLTYT

SEQ ID NO: 306 - protein, 63 aa, Homo sapiens
FDLVKCEDPGIPNYGYRIRDEGHFTDTVVLYSCNPGYAMHGSNTLTCLSGDRRVWDKPLPSCI

SEQ ID NO: 307 - protein, 2353 aa, Homo sapiens
FDLVKCEDPGIPNYGYRIRDEGHFTDTVVLYSCNPGYAMHGSNTLTCLSGDRRVWDKPLPSCIAECGGQIHAATSGRILSPGYPAPYDNNLHCTWIIEADPGKTISLHFIVFDTEMAHDILKVWDGPVDSDILLKEWSGSALPEDIHSTFNSLTLQFDSDFFISKSGFSIQFSTSIAATCNDPGMPQNGTRYGDSREAGDTVTFQCDPGYQLQGQAKITCVQLNNRFFWQPDPPTCIAACGGNLTGPAGVILSPNYPQPYPPGKECDWRVKVNPDFVIALIFKSFNMEPSYDFLHIYEGEDSNSPLIGSYQGSQAPERIESSGNSLFLAFRSDASVGLSGFAIEFKEKPREACFDPGNIMNGTRVGTDFKLGSTITYQCDSGYKILDPSSITCVIGADGKPSWDQVLPSCNAPCGGQYTGSEGVVLSPNYPHNYTAGQICLYSITVPKEFVVFGQFAYFQTALNDLAELFDGTHAQARLLSSLSGSHSGETLPLATSNQILLRFSAKSGASARGFHFVYQAVPRTSDTQCSSVPEPRYGRRIGSEFSAGSIVRFECNPGYLLQGSTALHCQSVPNALAQWNDTIPSCVVPCSGNFTQRRGTILSPGYPEPYGNNLNCIWKIIVTEGSGIQIQVISFATEQNWDSLEIHDGGDVTAPRLGSFSGTTVPALLNSTSNQLYLHFQSDISVAAAGFHLEYKTVGLAACQEPALPSNSIKIGDRYMVNDVLSFQCEPGYTLQGRSHISCMPGTVRRWNYPSPLCIATCGGTLSTLGGVILSPGFPGSYPNNLDCTWRISLPIGYGAHIQFLNFSTEANHDFLEIQNGPYHTSPMIGQFSGTDLPAALLSTTHETLIHFYSDHSQNRQGFKLAYQAYELQNCPDPPPFQNGYMINSDYSVGQSVSFECYPGYILIGHPVLTCQHGINRNWNYPFPRCDAPCGYNVTSQNGTIYSPGFPDEYPILKDCIWLITVPPGHGVYINFTLLQTEAVNDYIAVWDGPDQNSPQLGVFSGNTALETAYSSTNQVLLKFHSDFSNGGFFVLNFHAFQLKKCQPPPAVPQAEMLTEDDDFEIGDFVKYQCHPGYTLVGTDILTCKLSSQLQFEGSLPTCEAQCPANEVRTGSSGVILSPGYPGNYFNSQTCSWSIKVEPNYNITIFVDTFQSEKQFDALEVFDGSSGQSPLLVVLSGNHTEQSNFTSRSNQLYLRWSTDHATSKKGFKIRYAAPYCSLTHPLKNGGILNRTAGAVGSKVHYFCKPGYRMVGHSNATCRRNPLGMYQWDSLTPLCQAVSCGIPESPGNGSFTGNEFTLDSKVVYECHEGFKLESSQQATAVCQEDGLWSNKGKPPTCKPVACPSIEAQLSEHVIWRLVSGSLNEYGAQVLLSCSPGYYLEGWRLLRCQANGTWNIGDERPSCRVISCGSLSFPPNGNKIGTLTVYGATAIFTCNTGYTLVGSHVRECLANGLWSGSETRCLAGHCGSPDPIVNGHISGDGFSYRDTVVYQCNPGFRLVGTSVRICLQDHKWSGQTPVCVPITCGHPGNPAHGFTNGSEFNLNDVVNFTCNTGYLLQGVSRAQCRSNGQWSSPLPTCRVVNCSDPGFVENAIRHGQQNFPESFEYGMSILYHCKKGFYLLGSSALTCMANGLWDRSLPKCLAISCGHPGVPANAVLTGELFTYGAVVHYSCRGSESLIGNDTRVCQEDSHWSGALPHCTGNNPGFCGDPGTPAHGSRLGDDFKTKSLLRFSCEMGHQLRGSPERTCLLNGSWSGLQPVCEAVSCGNPGTPTNGMIVSSDGILFSSSVIYACWEGYKTSGLMTRHCTANGTWTGTAPDCTIISCGDPGTLANGIQFGTDFTFNKTVSYQCNPGYVMEAVTSATIRCTKDGRWNPSKPVCKAVLCPQPPPVQNGTVEGSDFRWGSSISYSCMDGYQLSHSAILSCEGRGVWKGEIPQCLPVFCGDPGIPAEGRLSGKSFTYKSEVFFQCKSPFILVGSSRRVCQADGTWSGIQPTCIDPAHNTCPDPGTPHFGIQNSSRGYEVGSTVFFRCRKGYHIQGSTTRTCLANLTWSGIQTECIPHACRQPETPAHADVRAIDLPTFGYTLVYTCHPGFFLAGGSEHRTCKADMKWTGKSPVCKSKGVREVNETVTKTPVPSDVFFVNSLWKGYYEYLGKRQPATLTVDWFNATSSKVNATFSEASPVELKLTGIYKKEEAHLLLKAFQIKGQADIFVSKFENDNWGLDGYVSSGLERGGFTFQGDIHGKDFGKFKLERQDPLNPDQDSSSHYHGTSSGSVAAAILVPFFALILSGFAFYLYKHRTRPKVQYNGYAGHENSNGQASFENPMYDTNLKPTEAKAVRFDTTLNTVCTVV

SEQ ID NO: 308 - protein, 3564 aa, Homo sapiens
MTAWRRFQSLLLLLGLLVLCARLLTAAKGQNCGGLVQGPNGTIESPGFPHGYPNYANCTWIIITGERNRIQLSFHTFALEEDFDILSVYDGQPQQGNLKVRLSGFQLPSSIVSTGSILTLWFTTDFAVSAQGFKALYEVLPSHTCGNPGEILKGVLHGTRFNIGDKIRYSCLPGYILEGHAILTCIVSPGNGASWDFPAPFCRAEGACGGTLRGTSSSISSPHFPSEYENNADCTWTILAEPGDTIALVFTDFQLEEGYDFLEISGTEAPSIWLTGMNLPSPVISSKNWLRLHFTSDSNHRRKGFNAQFQVKKAIELKSRGVKMLPSKDGSHKNSVLSQGGVALVSDMCPDPGIPENGRRAGSDFRVGANVQFSCEDNYVLQGSKSITCQRVTETLAAWSDHRPICRARTCGSNLRGPSGVITSPNYPVQYEDNAHCVWVITTTDPDKVIKLAFEEFELERGYDTLTVGDAGKVGDTRSVLYVLTGSSVPDLIVSMSNQMWLHLQSDDSIGSPGFKAVYQEIEKGGCGDPGIPAYGKRTGSSFLHGDTLTFECPAAFELVGERVITCQQNNQWSGNKPSCVFSCFFNFTASSGIILSPNYPEEYGNNMNCVWLIISEPGSRIHLIFNDFDVEPQFDFLAVKDDGISDITVLGTFSGNEVPSQLASSGHIVRLEFQSDHSTTGRGFNITYTTFGQNECHDPGIPINGRRFGDRFLLGSSVSFHCDDGFVKTQGSESITCILQDGNVVWSSTVPRCEAPCGGHLTASSGVILPPGWPGYYKDSLHCEWIIEAKPGHSIKITFDRFQTEVNYDTLEVRDGPASSSPLIGEYHGTQAPQFLISTGNFMYLLFTTDNSRSSIGFLIHYESVTLESDSCLDPGIPVNGHRHGGDFGIRSTVTFSCDPGYTLSDDEPLVCERNHQWNHALPSCDALCGGYIQGKSGTVLSPGFPDFYPNSLNCTWTIEVSHGKGVQMIFHTFHLESSHDYLLITEDGSFSEPVARLTGSVLPHTIKAGLFGNFTAQLRFISDFSISYEGFNITFSEYDLEPCDDPGVPAFSRRIGFHFGVGDSLTFSCFLGYRLEGATKLTCLGGGRRVWSAPLPRCVAECGASVKGNEGTLLSPNFPSNYDNNHECIYKIETEAGKGIHLRTRSFQLFEGDTLKVYDGKDSSSRPLGTFTKNELLGLILNSTSNHLWLEFNTNGSDTDQGFQLTYTSFDLVKCEDPGIPNYGYRIRDEGHFTDTVVLYSCNPGYAMHGSNTLTCLSGDRRVWDKPLPSCIAECGGQIHAATSGRILSPGYPAPYDNNLHCTWIIEADPGKTISLHFIVFDTEMAHDILKVWDGPVDSDILLKEWSGSALPEDIHSTFNSLTLQFDSDFFISKSGFSIQFSTSIAATCNDPGMPQNGTRYGDSREAGDTVTFQCDPGYQLQGQAKITCVQLNNRFFWQPDPPTCIAACGGNLTGPAGVILSPNYPQPYPPGKECDWRVKVNPDFVIALIFKSFNMEPSYDFLHIYEGEDSNSPLIGSYQGSQAPERIESSGNSLFLAFRSDASVGLSGFAIEFKEKPREACFDPGNIMNGTRVGTDFKLGSTITYQCDSGYKILDPSSITCVIGADGKPSWDQVLPSCNAPCGGQYTGSEGVVLSPNYPHNYTAGQICLYSITVPKEFVVFGQFAYFQTALNDLAELFDGTHAQARLLSSLSGSHSGETLPLATSNQILLRFSAKSGASARGFHFVYQAVPRTSDTQCSSVPEPRYGRRIGSEFSAGSIVRFECNPGYLLQGSTALHCQSVPNALAQWNDTIPSCVVPCSGNFTQRRGTILSPGYPEPYGNNLNCIWKIIVTEGSGIQIQVISFATEQNWDSLEIHDGGDVTAPRLGSFSGTTVPALLNSTSNQLYLHFQSDISVAAAGFHLEYKTVGLAACQEPALPSNSIKIGDRYMVNDVLSFQCEPGYTLQGRSHISCMPGTVRRWNYPSPLCIATCGGTLSTLGGVILSPGFPGSYPNNLDCTWRISLPIGYGAHIQFLNFSTEANHDFLEIQNGPYHTSPMIGQFSGTDLPAALLSTTHETLIHFYSDHSQNRQGFKLAYQAYELQNCPDPPPFQNGYMINSDYSVGQSVSFECYPGYILIGHPVLTCQHGINRNWNYPFPRCDAPCGYNVTSQNGTIYSPGFPDEYPILKDCIWLITVPPGHGVYINFTLLQTEAVNDYIAVWDGPDQNSPQLGVFSGNTALETAYSSTNQVLLKFHSDFSNGGFFVLNFHAFQLKKCQPPPAVPQAEMLTEDDDFEIGDFVKYQCHPGYTLVGTDILTCKLSSQLQFEGSLPTCEAQCPANEVRTGSSGVILSPGYPGNYFNSQTCSWSIKVEPNYNITIFVDTFQSEKQFDALEVFDGSSGQSPLLVVLSGNHTEQSNFTSRSNQLYLRWSTDHATSKKGFKIRYAAPYCSLTHPLKNGGILNRTAGAVGSKVHYFCKPGYRMVGHSNATCRRNPLGMYQWDSLTPLCQAVSCGIPESPGNGSFTGNEFTLDSKVVYECHEGFKLESSQQATAVCQEDGLWSNKGKPPTCKPVACPSIEAQLSEHVIWRLVSGSLNEYGAQVLLSCSPGYYLEGWRLLRCQANGTWNIGDERPSCRVISCGSLSFPPNGNKIGTLTVYGATAIFTCNTGYTLVGSHVRECLANGLWSGSETRCLAGHCGSPDPIVNGHISGDGFSYRDTVVYQCNPGFRLVGTSVRICLQDHKWSGQTPVCVPITCGHPGNPAHGFTNGSEFNLNDVVNFTCNTGYLLQGVSRAQCRSNGQWSSPLPTCRVVNCSDPGFVENAIRHGQQNFPESFEYGMSILYHCKKGFYLLGSSALTCMANGLWDRSLPKCLAISCGHPGVPANAVLTGELFTYGAVVHYSCRGSESLIGNDTRVCQEDSHWSGALPHCTGNNPGFCGDPGTPAHGSRLGDDFKTKSLLRFSCEMGHQLRGSPERTCLLNGSWSGLQPVCEAVSCGNPGTPTNGMIVSSDGILFSSSVIYACWEGYKTSGLMTRHCTANGTWTGTAPDCTIISCGDPGTLANGIQFGTDFTFNKTVSYQCNPGYVMEAVTSATIRCTKDGRWNPSKPVCKAVLCPQPPPVQNGTVEGSDFRWGSSISYSCMDGYQLSHSAILSCEGRGVWKGEIPQCLPVFCGDPGIPAEGRLSGKSFTYKSEVFFQCKSPFILVGSSRRVCQADGTWSGIQPTCIDPAHNTCPDPGTPHFGIQNSSRGYEVGSTVFFRCRKGYHIQGSTTRTCLANLTWSGIQTECIPHACRQPETPAHADVRAIDLPTFGYTLVYTCHPGFFLAGGSEHRTCKADMKWTGKSPVCKSKGVREVNETVTKTPVPSDVFFVNSLWKGYYEYLGKRQPATLTVDWFNATSSKVNATFSEASPVELKLTGIYKKEEAHLLLKAFQIKGQADIFVSKFENDNWGLDGYVSSGLERGGFTFQGDIHGKDFGKFKLERQDPLNPDQDSSSHYHGTSSGSVAAAILVPFFALILSGFAFYLYKHRTRPKVQYNGYAGHENSNGQASFENPMYDTNLKPTEAKAVRFDTTLNTVCTVV

SEQ ID NO: 309 - DNA, 4129 bp, Homo sapiens
ctccacggcagcggctccttgtgccactagcagcccttcttctgcgctctccgccttttctctctagactggatctctcctcccccccgcgcccccctccccgcatctcccactcgctggctctctctccagctgcctcctctccaggtctctcctggctgcgcgcgctcctctccccgcttctccccctcccgcagcctcgccgccttggtgccttcctgcccggctcggccggcgctcgtccccggccccggccccgccagcccgggtctccgcgctcggagcagctcagccctgcagtggctcgggacccgatgctatgagagggaagcgagccgggcgcccagaccttcaggaggcgtcggatgcgcggcgggtcttgggaccgggctctctctccggctcgccttgccctcgggtgattatttggctccgctcatagccctgccttcctcggaggagccatcggtgtcgcgtgcgtgtggagtatctgcagacatgactgcgtggaggagattccagtcgctgctcctgcttctcgggctgctggtgctgtgcgcgaggctcctcactgcagcgaagggtcagaactgtggaggcttagtccagggtcccaatggcactattgagagcccagggtttcctcacgggtatccgaactatgccaactgcacctggatcatcatcacgggcgagcgcaataggatacagttgtccttccatacctttgctcttgaagaagattttgatattttatcagtttacgatggacagcctcaacaagggaatttaaaagtgagattatcgggatttcagctgccctcctctatagtgagtacaggatctatcctcactctgtggttcacgacagacttcgctgtgagtgcccaaggtttcaaagcattatatgaagttttacctagccacacttgtggaaatcctggagaaatcctgaaaggagttctgcatggaacgagattcaacataggagacaaaatccggtacagctgcctccctggctacatcttggaaggccacgccatcctgacctgcatcgtcagcccaggaaatggtgcatcgtgggacttcccagctcccttttgcagagctgagggagcctgcggaggaaccttacgcgggaccagcagctccatctccagcccgcacttcccttcagagtacgagaacaacgcggactgcacctggaccattctggctgagcccggggacaccattgcgctggtcttcactgactttcagctagaagaaggatatgatttcttagagatcagtggcacggaagctccatccatatggctaactggcatgaacctcccctctccagttatcagtagcaagaattggctacgactccatttcacctctgacagcaaccaccgacgcaaaggatttaacgctcagttccaagtgaaaaaggcgattgagttgaagtcaagaggagtcaagatgctgcccagcaaggatggaagccataaaaactctgtcttgagccaaggaggtgttgcattggtctctgacatgtgtccagatcctgggattccagaaaatggtagaagagcaggttccgacttcagggttggtgcaaatgtacagttttcatgtgaggacaattacgtgctccagggatctaaaagcatcacctgtcagagagttacagagacgctcgctgcttggagtgaccacaggcccatctgccgagcgagaacatgtggatccaatctgcgtgggcccagcggcgtcattacctcccctaattatccggttcagtatgaagataatgcacactgtgtgtgggtcatcaccaccaccgacccggacaaggtcatcaagcttgcctttgaagagtttgagctggagcgaggctatgacaccctgacggttggtgatgctgggaaggtgggagacaccagatcggtcttgtacgtgctcacgggatccagtgttcctgacctcattgtgagcatgagcaaccagatgtggctacatctgcagtcggatgatagcattggctcacctgggtttaaagctgtttaccaagaaattgaaaagggagggtgtggggatcctggaatccccgcctatgggaagcggacgggcagcagtttcctccatggagatacactcacctttgaatgcccggcggcctttgagctggtgggggagagagttatcacctgtcagcagaacaatcagtggtctggcaacaagcccagctgtgtattttcatgtttcttcaactttacggcatcatctgggattattctgtcaccaaattatccagaggaatatgggaacaacatgaactgtgtctggttgattatctcggagccaggaagtcgaattcacctaatctttaatgattttgatgttgagcctcagtttgactttctcgcggtcaaggatgatggcatttctgacataactgtcctgggtactttttctggcaatgaagtgccttcccagctggccagcagtgggcatatagttcgcttggaatttcagtctgaccattccactactggcagagggttcaacatcacttacaccacatttggtcagaatgagtgccatgatcctggcattcctataaacggacgacgttttggtgacaggtttctactcgggagctcggtttctttccactgtgatgatggctttgtcaagacccagggatccgagtccattacctgcatactgcaagacgggaacgtggtctggagctccaccgtgccccgctgtgaagctccatgtggtggacatctgacagcgtccagcggagtcattttgcctcctggatggccaggatattataaggattctttacattgtgaatggataattgaagcaaaaccaggccactctatcaaaataacttttgacagatttcagacagaggtcaattatgacaccttggaggtcagagatgggccagccagttcgtccccactgatcggcgagtaccacggcacccaggcaccccagttcctcatcagcaccgggaacttcatgtacctgctgttcaccactgacaacagccgctccagcatcggcttcctcatccactatgagagtgtgacgcttgagtcggattcctgcctggacccgggcatccctgtgaacggccatcgccacggtggagactttggcatcaggtccacagtgactttcagctgtgacccggggtacacactaagtgacgacgagcccctcgtctgtgagaggaaccaccagtggaaccacgccttgcccagctgcgacgctctatgtggaggctacatccaagggaagagtggaacagtcctttctcctgggtttccagatttttatccaaactctctaaactgcacgtggaccattgaagtgtctcatgggaaaggagttcaaatgatctttcacacctttcatcttgagagttcccacgactatttactgatcacagaggatggaagtttttccgagcccgttgccaggctcaccgggtcggtgttgcctcatacgatcaaggcaggcctgtttggaaacttcactgcccagcttcggtttatatcagacttctcaatttcgtacgagggcttcaatatcacattttcagaatatgacctggagccatgtgatgatcctggagtccctgccttcagccgaagaattggttttcactttggtgtgggagactctctgacgttttcctgcttcctgggatatcgtttagaaggtgccaccaagcttacctgcctgggtgggggccgccgtgtgtggagtgcacctctgccaaggtgtgtggccgaatgtggagcaagtgtcaaaggaaatgaaggaacattactgtctccaaattttccatccaattatgataataaccatgagtgtatctataaaatagaaacagaagccggcaagggcatccaccttagaacacgaagcttccagctgtttgaaggagatactctaaaggtatatgatggaaaagacagttcctcacgtccactgggcacgttcactaaaaatgaacttctggggctgatcctaaacagcacatccaatcacctgtggctagagttcaacaccaatggatctgacaccgaccaaggttttcaactcacctatacca

SEQ ID NO: 310 - protein, 1210 aa, Homo sapiens
MTAWRRFQSLLLLLGLLVLCARLLTAAKGQNCGGLVQGPNGTIESPGFPHGYPNYANCTWIIITGERNRIQLSFHTFALEEDFDILSVYDGQPQQGNLKVRLSGFQLPSSIVSTGSILTLWFTTDFAVSAQGFKALYEVLPSHTCGNPGEILKGVLHGTRFNIGDKIRYSCLPGYILEGHAILTCIVSPGNGASWDFPAPFCRAEGACGGTLRGTSSSISSPHFPSEYENNADCTWTILAEPGDTIALVFTDFQLEEGYDFLEISGTEAPSIWLTGMNLPSPVISSKNWLRLHFTSDSNHRRKGFNAQFQVKKAIELKSRGVKMLPSKDGSHKNSVLSQGGVALVSDMCPDPGIPENGRRAGSDFRVGANVQFSCEDNYVLQGSKSITCQRVTETLAAWSDHRPICRARTCGSNLRGPSGVITSPNYPVQYEDNAHCVWVITTTDPDKVIKLAFEEFELERGYDTLTVGDAGKVGDTRSVLYVLTGSSVPDLIVSMSNQMWLHLQSDDSIGSPGFKAVYQEIEKGGCGDPGIPAYGKRTGSSFLHGDTLTFECPAAFELVGERVITCQQNNQWSGNKPSCVFSCFFNFTASSGIILSPNYPEEYGNNMNCVWLIISEPGSRIHLIFNDFDVEPQFDFLAVKDDGISDITVLGTFSGNEVPSQLASSGHIVRLEFQSDHSTTGRGFNITYTTFGQNECHDPGIPINGRRFGDRFLLGSSVSFHCDDGFVKTQGSESITCILQDGNVVWSSTVPRCEAPCGGHLTASSGVILPPGWPGYYKDSLHCEWIIEAKPGHSIKITFDRFQTEVNYDTLEVRDGPASSSPLIGEYHGTQAPQFLISTGNFMYLLFTTDNSRSSIGFLIHYESVTLESDSCLDPGIPVNGHRHGGDFGIRSTVTFSCDPGYTLSDDEPLVCERNHQWNHALPSCDALCGGYIQGKSGTVLSPGFPDFYPNSLNCTWTIEVSHGKGVQMIFHTFHLESSHDYLLITEDGSFSEPVARLTGSVLPHTIKAGLFGNFTAQLRFISDFSISYEGFNITFSEYDLEPCDDPGVPAFSRRIGFHFGVGDSLTFSCFLGYRLEGATKLTCLGGGRRVWSAPLPRCVAECGASVKGNEGTLLSPNFPSNYDNNHECIYKIETEAGKGIHLRTRSFQLFEGDTLKVYDGKDSSSRPLGTFTKNELLGLILNSTSNHLWLEFNTNGSDTDQGFQLTYT

SEQ ID NO: 311 - DNA, 102 bp, Homo sapiens
ccagaactggaagtctgaagcgagccctgcacaatgccgaatgccagaagactgtcaccatctccaagccctgtggcaaactgaccaagcccaaacctcaag

SEQ ID NO: 312 - DNA, 103 bp, Homo sapiens
ccttgcctccccgattgaaagagatgaaaagccaggaatcggctgcaggttccaaactagtccttcggtgtgaaaccagttctgaatactcctctctcagatt

SEQ ID NO: 313 - DNA, 205 bp, Homo sapiens
ccagaactggaagtctgaagcgagccctgcacaatgccgaatgccagaagactgtcaccatctccaagccctgtggcaaactgaccaagcccaaacctcaagccttgcctccccgattgaaagagatgaaaagccaggaatcggctgcaggttccaaactagtccttcggtgtgaaaccagttctgaatactcctctctcagatt

SEQ ID NO: 314 - protein, 67 aa, Homo sapiens
RTGSLKRALHNAECQKTVTISKPCGKLTKPKPQALPPRLKEMKSQESAAGSKLVLRCETSSEYSSLR

SEQ ID NO: 315 - DNA, 532 bp, Homo sapiens
aaggggaaataagggacaagagagaccctctcatattgttttatattatttcatactcagaaaaggaaagagaagccaaacaaaaggcaggtaacccagcgcctaggaaccagacccgaaaccaaggaaccagatctgaaaccaggcctgggcctgcctgacctaagcctggtagtaaaaattccacccctgacctgacctggcaactgttgttatctacagattccagacattgtatggaaggacactgtgaaacctcccgttctgttctgtttcactctgaccatcggtgctcacagcccctatcacgtaccccctggcttgctcagtcgatcacgaccctctcacgtggacccccttagagttgttagcccttaaaagggacagaagttgagcacctgaggagctcagattttaagacgctaggctgctgatgctcccagctgattaaagccactcccttcactatctcggtgtctcctgtccgcggctcgtcctgctacatttcttggttccctgaccggcaagcgag

SEQ ID NO: 316 - DNA, 116 bp, Homo sapiens
aatgcaggctcaacagtaccagcagcagcgtcgaaaatttgcagctgccttcttggcattcattttcatactggcagctgtggatactgctgaagcagggaagaaagagaaaccag

SEQ ID NO: 317 - DNA, 174 bp, Homo sapiens
aaaaaaaagtgaagaagtctgactgtggagaatggcagtggagtgtgtgtgtgcccaccagtggagactgtgggctgggcacacgggagggcactcggactggagctgagtgcaagcaaaccatgaagacccagagatgtaagatcccctgcaactggaagaagcaatttggcg

SEQ ID NO: 318 - DNA, 162 bp, Homo sapiens
cggagtgcaaataccagttccaggcctggggagaatgtgacctgaacacagccctgaagaccagaactggaagtctgaagcgagccctgcacaatgccgaatgccagaagactgtcaccatctccaagccctgtggcaaactgaccaagcccaaacctcaag

SEQ ID NO: 319 - DNA, 735 bp, Homo sapiens
cagaatctaagaagaagaaaaaggaaggcaagaaacaggagaagatgctggattaaaagatgtcacctgtggaacataaaaaggacatcagcaaacaggatcagttaactattgcatttatatgtaccgtaggctttgtattcaaaaattatctatagctaagtacacaataagcaaaaacaaaaagaaaagaaaatttttgtagtagcgttttttaaatgtatactatagtaccagtaggggcttataataaaggactgtaatcttatttaggaagttgacttatagtacatgataaatgatagacaattgaggtaagttttttgaaattatgtgacattttacattaaattttttttacattttttgggcagcaatttaaatgttatgactatgtaaactacttctcttgttaggtaatttttttcacctagatttttttcccaattgagaaaaatatatactaaacaaaatagcaataaaacataatcactctatttgaagaaaatatcttgttttctgccaatagattttttaaaatgtagtcagcaaaatgggggtggggaagcagagcatgtcctagttcaatgttgactttttttttttttaaagaaaagcattaagacataaaattctttcactttggcagaagcatttgttttcttgatgaaattatttttccatctgaggaaaaaaatactaggaaaataaatcaaggtgatgctgaaaaaaaaa

SEQ ID NO: 320 - DNA, 1719 bp, Homo sapiens
aaggggaaataagggacaagagagaccctctcatattgttttatattatttcatactcagaaaaggaaagagaagccaaacaaaaggcaggtaacccagcgcctaggaaccagacccgaaaccaaggaaccagatctgaaaccaggcctgggcctgcctgacctaagcctggtagtaaaaattccacccctgacctgacctggcaactgttgttatctacagattccagacattgtatggaaggacactgtgaaacctcccgttctgttctgtttcactctgaccatcggtgctcacagcccctatcacgtaccccctggcttgctcagtcgatcacgaccctctcacgtggacccccttagagttgttagcccttaaaagggacagaagttgagcacctgaggagctcagattttaagacgctaggctgctgatgctcccagctgattaaagccactcccttcactatctcggtgtctcctgtccgcggctcgtcctgctacatttcttggttccctgaccggcaagcgagaatgcaggctcaacagtaccagcagcagcgtcgaaaatttgcagctgccttcttggcattcattttcatactggcagctgtggatactgctgaagcagggaagaaagagaaaccagaaaaaaaagtgaagaagtctgactgtggagaatggcagtggagtgtgtgtgtgcccaccagtggagactgtgggctgggcacacgggagggcactcggactggagctgagtgcaagcaaaccatgaagacccagagatgtaagatcccctgcaactggaagaagcaatttggcgcggagtgcaaataccagttccaggcctggggagaatgtgacctgaacacagccctgaagaccagaactggaagtctgaagcgagccctgcacaatgccgaatgccagaagactgtcaccatctccaagccctgtggcaaactgaccaagcccaaacctcaagcagaatctaagaagaagaaaaaggaaggcaagaaacaggagaagatgctggattaaaagatgtcacctgtggaacataaaaaggacatcagcaaacaggatcagttaactattgcatttatatgtaccgtaggctttgtattcaaaaattatctatagctaagtacacaataagcaaaaacaaaaagaaaagaaaatttttgtagtagcgttttttaaatgtatactatagtaccagtaggggcttataataaaggactgtaatcttatttaggaagttgacttatagtacatgataaatgatagacaattgaggtaagttttttgaaattatgtgacattttacattaaattttttttacattttttgggcagcaatttaaatgttatgactatgtaaactacttctcttgttaggtaatttttttcacctagatttttttcccaattgagaaaaatatatactaaacaaaatagcaataaaacataatcactctatttgaagaaaatatcttgttttctgccaatagattttttaaaatgtagtcagcaaaatgggggtggggaagcagagcatgtcctagttcaatgttgactttttttttttttaaagaaaagcattaagacataaaattctttcactttggcagaagcatttgttttcttgatgaaattatttttccatctgaggaaaaaaatactaggaaaataaatcaaggtgatgctgaaaaaaaaa

SEQ ID NO: 321 - protein, 38 aa, Homo sapiens
MQAQQYQQQRRKFAAAFLAFIFILAAVDTAEAGKKEKP

SEQ ID NO: 322 - protein, 57 aa, Homo sapiens
KKVKKSDCGEWQWSVCVPTSGDCGLGTREGTRTGAECKQTMKTQRCKIPCNWKKQFG

SEQ ID NO: 323 - protein, 53 aa, Homo sapiens
ECKYQFQAWGECDLNTALKTRTGSLKRALHNAECQKTVTISKPCGKLTKPKPQ

SEQ ID NO: 324 - protein, 17 aa, Homo sapiens
ESKKKKKEGKKQEKMLD

SEQ ID NO: 325 - protein, 168 aa, Homo sapiens
MQAQQYQQQRRKFAAAFLAFIFILAAVDTAEAGKKEKPEKKVKKSDCGEWQWSVCVPTSGDCGLGTREGTRTGAECKQTMKTQRCKIPCNWKKQFGAECKYQFQAWGECDLNTALKTRTGSLKRALHNAECQKTVTISKPCGKLTKPKPQAESKKKKKEGKKQEKMLD

SEQ ID NO: 326 - DNA, 984 bp, Homo sapiens
aaggggaaataagggacaagagagaccctctcatattgttttatattatttcatactcagaaaaggaaagagaagccaaacaaaaggcaggtaacccagcgcctaggaaccagacccgaaaccaaggaaccagatctgaaaccaggcctgggcctgcctgacctaagcctggtagtaaaaattccacccctgacctgacctggcaactgttgttatctacagattccagacattgtatggaaggacactgtgaaacctcccgttctgttctgtttcactctgaccatcggtgctcacagcccctatcacgtaccccctggcttgctcagtcgatcacgaccctctcacgtggacccccttagagttgttagcccttaaaagggacagaagttgagcacctgaggagctcagattttaagacgctaggctgctgatgctcccagctgattaaagccactcccttcactatctcggtgtctcctgtccgcggctcgtcctgctacatttcttggttccctgaccggcaagcgagaatgcaggctcaacagtaccagcagcagcgtcgaaaatttgcagctgccttcttggcattcattttcatactggcagctgtggatactgctgaagcagggaagaaagagaaaccagaaaaaaaagtgaagaagtctgactgtggagaatggcagtggagtgtgtgtgtgcccaccagtggagactgtgggctgggcacacgggagggcactcggactggagctgagtgcaagcaaaccatgaagacccagagatgtaagatcccctgcaactggaagaagcaatttggcgcggagtgcaaataccagttccaggcctggggagaatgtgacctgaacacagccctgaagaccagaactggaagtctgaagcgagccctgcacaatgccgaatgccagaagactgtcaccatctccaagccctgtggcaaactgaccaagcccaaacctcaag

SEQ ID NO: 327 - protein, 150 aa, Homo sapiens
MQAQQYQQQRRKFAAAFLAFIFILAAVDTAEAGKKEKPEKKVKKSDCGEWQWSVCVPTSGDCGLGTREGTRTGAECKQTMKTQRCKIPCNWKKQFGAECKYQFQAWGECDLNTALKTRTGSLKRALHNAECQKTVTISKPCGKLTKPKPQ

SEQ ID NO: 328 - DNA, 95 bp, Homo sapiens
caacagcaacaagatcacagttcgcttccactcagatcagtcctacaccgacaccggcttcttagctgaatacctctcctacgactccagtgacc

SEQ ID NO: 329 - DNA, 87 bp, Homo sapiens
ctacatctacatccaccactgggacaagccatcttgtaaaatgtgcggagaaggagaaaactttctgtgtgaatggaggggagtgct

SEQ ID NO: 330 - DNA, 182 bp, Homo sapiens
caacagcaacaagatcacagttcgcttccactcagatcagtcctacaccgacaccggcttcttagctgaatacctctcctacgactccagtgaccctacatctacatccaccactgggacaagccatcttgtaaaatgtgcggagaaggagaaaactttctgtgtgaatggaggggagtgct

SEQ ID NO: 331 - protein, 60 aa, Homo sapiens
NSNKITVRFHSDQSYTDTGFLAEYLSYDSSDPTSTSTTGTSHLVKCAEKEKTFCVNGGEC

SEQ ID NO: 332 - DNA, 279 bp, Homo sapiens
gtgagagcggagctgcagccggagaaagaggaagagggagagagagcgcgccagggcgagggcaccgccgccggtcgggcgcgctgggcctgcccggaatcccgccgcctgcgccccgcgccccgcgccctgcgggccatgggagccggccgccggcagggacgacgcctgtgagacccgcgagcggcctcggggaccatggggagcgatcgggcccgcaagggcggagggggcccgaaggacttcggcgcgggactcaagtacaactcccggcacgag

SEQ ID NO: 333 - DNA, 160 bp, Homo sapiens
aaagtgaatggcttggaggaaggcgtggagttcctgccagtcaacaacgtcaagaaggtggaaaagcatggcccggggcgctgggtggtgctggcagccgtgctgatcggcctcctcttggtcttgctggggatcggcttcctggtgtggcatttgcagt

SEQ ID NO: 334 - DNA, 128 bp, Homo sapiens
accgggacgtgcgtgtccagaaggtcttcaatggctacatgaggatcacaaatgagaattttgtggatgcctacgagaactccaactccactgagtttgtaagcctggccagcaaggtgaaggacgcg

SEQ ID NO: 335 - DNA, 71 bp, Homo sapiens
ctgaagctgctgtacagcggagtcccattcctgggcccctaccacaaggagtcggctgtgacggccttcag

SEQ ID NO: 336 - DNA, 158 bp, Homo sapiens
cgagggcagcgtcatcgcctactactggtctgagttcagcatcccgcagcacctggtggaggaggccgagcgcgtcatggccgaggagcgcgtagtcatgctgcccccgcgggcgcgctccctgaagtcctttgtggtcacctcagtggtggctttcc

SEQ ID NO: 337 - DNA, 36 bp, Homo sapiens
ccacggactccaaaacagtacagaggacccaggaca

SEQ ID NO: 338 - DNA, 241 bp, Homo sapiens
acagctgcagctttggcctgcacgcccgcggtgtggagctgatgcgcttcaccacgcccggcttccctgacagcccctaccccgctcatgcccgctgccagtgggccctgcggggggacgccgactcagtgctgagcctcaccttccgcagctttgaccttgcgtcctgcgacgagcgcggcagcgacctggtgacggtgtacaacaccctgagccccatggagccccacgccctggtgca

SEQ ID NO: 339 - DNA, 140 bp, Homo sapiens
gttgtgtggcacctaccctccctcctacaacctgaccttccactcctcccagaacgtcctgctcatcacactgataaccaacactgagcggcggcatcccggctttgaggccaccttcttccagctgcctaggatgagca

SEQ ID NO: 340 - DNA, 98 bp, Homo sapiens
gctgtggaggccgcttacgtaaagcccaggggacattcaacagcccctactacccaggccactacccacccaacattgactgcacatggaacattgag

SEQ ID NO: 341 - DNA, 110 bp, Homo sapiens
gtgcccaacaaccagcatgtgaaggtgcgcttcaaattcttctacctgctggagcccggcgtgcctgcgggcacctgccccaaggactacgtggagatcaacggggagaa

SEQ ID NO: 342 - DNA, 131 bp, Homo sapiens
atactgcggagagaggtcccagttcgtcgtcaccagcaacagcaacaagatcacagttcgcttccactcagatcagtcctacaccgacaccggcttcttagctgaatacctctcctacgactccagtgacc

SEQ ID NO: 343 - DNA, 105 bp, Homo sapiens
catgcccggggcagttcacgtgccgcacggggcggtgtatccggaaggagctgcgctgtgatggctgggccgactgcaccgaccacagcgatgagctcaactgca

SEQ ID NO: 344 - DNA, 111 bp, Homo sapiens
gttgcgacgccggccaccagttcacgtgcaagaacaagttctgcaagcccctcttctgggtctgcgacagtgtgaacgactgcggagacaacagcgacgagcaggggtgca

SEQ ID NO: 345 - DNA, 114 bp, Homo sapiens
gttgtccggcccagaccttcaggtgttccaatgggaagtgcctctcgaaaagccagcagtgcaatgggaaggacgactgtggggacgggtccgacgaggcctcctgccccaagg

SEQ ID NO: 346 - DNA, 123 bp, Homo sapiens
tgaacgtcgtcacttgtaccaaacacacctaccgctgcctcaatgggctctgcttgagcaagggcaaccctgagtgtgacgggaaggaggactgtagcgacggctcagatgagaaggactgcg

SEQ ID NO: 347 - DNA, 187 bp, Homo sapiens
actgtgggctgcggtcattcacgagacaggctcgtgttgttgggggcacggatgcggatgagggcgagtggccctggcaggtaagcctgcatgctctgggccagggccacatctgcggtgcttccctcatctctcccaactggctggtctctgccgcacactgctacatcgatgacagaggattcag

SEQ ID NO: 348 - DNA, 275 bp, Homo sapiens
gtactcagaccccacgcagtggacggccttcctgggcttgcacgaccagagccagcgcagcgcccctggggtgcaggagcgcaggctcaagcgcatcatctcccaccccttcttcaatgacttcaccttcgactatgacatcgcgctgctggagctggagaaaccggcagagtacagctccatggtgcggcccatctgcctgccggacgcctcccatgtcttccctgccggcaaggccatctgggtcacgggctggggacacacccagtatggag

SEQ ID NO: 349 - DNA, 137 bp, Homo sapiens
gcactggcgcgctgatcctgcaaaagggtgagatccgcgtcatcaaccagaccacctgcgagaacctcctgccgcagcagatcacgccgcgcatgatgtgcgtgggcttcctcagcggcggcgtggactcctgccag

SEQ ID NO: 350 - DNA, 701 bp, Homo sapiens
ggtgattccgggggacccctgtccagcgtggaggcggatgggcggatcttccaggccggtgtggtgagctggggagacggctgcgctcagaggaacaagccaggcgtgtacacaaggctccctctgtttcgggactggatcaaagagaacactggggtataggggccggggccacccaaatgtgtacacctgcggggccacccatcgtccaccccagtgtgcacgcctgcaggctggagactggaccgctgactgcaccagcgcccccagaacatacactgtgaactcaatctccagggctccaaatctgcctagaaaacctctcgcttcctcagcctccaaagtggagctgggaggtagaaggggaggacactggtggttctactgacccaactgggggcaaaggtttgaagacacagcctcccccgccagccccaagctgggccgaggcgcgtttgtgcatatctgcctcccctgtctctaaggagcagcgggaacggagcttcggggcctcctcagtgaaggtggtggggctgccggatctgggctgtggggcccttgggccacgctcttgaggaagcccaggctcggaggaccctggaaaacagacgggtctgagactgaaattgttttaccagctcccagggtggacttcagtgtgtgtatttgtgtaaatgagtaaaacattttatttcttttta

SEQ ID NO: 351 - DNA, 3305 bp, Artificial Sequence
  Full mRNA polynucleotide sequence of ST14
gtgagagcggagctgcagccggagaaagaggaagagggagagagagcgcgccagggcgagggcaccgccgccggtcgggcgcgctgggcctgcccggaatcccgccgcctgcgccccgcgccccgcgccctgcgggccatgggagccggccgccggcagggacgacgcctgtgagacccgcgagcggcctcggggaccatggggagcgatcgggcccgcaagggcggagggggcccgaaggacttcggcgcgggactcaagtacaactcccggcacgagaaagtgaatggcttggaggaaggcgtggagttcctgccagtcaacaacgtcaagaaggtggaaaagcatggcccggggcgctgggtggtgctggcagccgtgctgatcggcctcctcttggtcttgctggggatcggcttcctggtgtggcatttgcagtaccgggacgtgcgtgtccagaaggtcttcaatggctacatgaggatcacaaatgagaattttgtggatgcctacgagaactccaactccactgagtttgtaagcctggccagcaaggtgaaggacgcgctgaagctgctgtacagcggagtcccattcctgggcccctaccacaaggagtcggctgtgacggccttcagcgagggcagcgtcatcgcctactactggtctgagttcagcatcccgcagcacctggtggaggaggccgagcgcgtcatggccgaggagcgcgtagtcatgctgcccccgcgggcgcgctccctgaagtcctttgtggtcacctcagtggtggctttccccacggactccaaaacagtacagaggacccaggacaacagctgcagctttggcctgcacgcccgcggtgtggagctgatgcgcttcaccacgcccggcttccctgacagcccctaccccgctcatgcccgctgccagtgggccctgcggggggacgccgactcagtgctgagcctcaccttccgcagctttgaccttgcgtcctgcgacgagcgcggcagcgacctggtgacggtgtacaacaccctgagccccatggagccccacgccctggtgcagttgtgtggcacctaccctccctcctacaacctgaccttccactcctcccagaacgtcctgctcatcacactgataaccaacactgagcggcggcatcccggctttgaggccaccttcttccagctgcctaggatgagcagctgtggaggccgcttacgtaaagcccaggggacattcaacagcccctactacccaggccactacccacccaacattgactgcacatggaacattgaggtgcccaacaaccagcatgtgaaggtgcgcttcaaattcttctacctgctggagcccggcgtgcctgcgggcacctgccccaaggactacgtggagatcaacggggagaaatactgcggagagaggtcccagttcgtcgtcaccagcaacagcaacaagatcacagttcgcttccactcagatcagtcctacaccgacaccggcttcttagctgaatacctctcctacgactccagtgacccatgcccggggcagttcacgtgccgcacggggcggtgtatccggaaggagctgcgctgtgatggctgggccgactgcaccgaccacagcgatgagctcaactgcagttgcgacgccggccaccagttcacgtgcaagaacaagttctgcaagcccctcttctgggtctgcgacagtgtgaacgactgcggagacaacagcgacgagcaggggtgcagttgtccggcccagaccttcaggtgttccaatgggaagtgcctctcgaaaagccagcagtgcaatgggaaggacgactgtggggacgggtccgacgaggcctcctgccccaaggtgaacgtcgtcacttgtaccaaacacacctaccgctgcctcaatgggctctgcttgagcaagggcaaccctgagtgtgacgggaaggaggactgtagcgacggctcagatgagaaggactgcgactgtgggctgcggtcattcacgagacaggctcgtgttgttgggggcacggatgcggatgagggcgagtggccctggcaggtaagcctgcatgctctgggccagggccacatctgcggtgcttccctcatctctcccaactggctggtctctgccgcacactgctacatcgatgacagaggattcaggtactcagaccccacgcagtggacggccttcctgggcttgcacgaccagagccagcgcagcgcccctggggtgcaggagcgcaggctcaagcgcatcatctcccaccccttcttcaatgacttcaccttcgactatgacatcgcgctgctggagctggagaaaccggcagagtacagctccatggtgcggcccatctgcctgccggacgcctcccatgtcttccctgccggcaaggccatctgggtcacgggctggggacacacccagtatggaggcactggcgcgctgatcctgcaaaagggtgagatccgcgtcatcaaccagaccacctgcgagaacctcctgccgcagcagatcacgccgcgcatgatgtgcgtgggcttcctcagcggcggcgtggactcctgccagggtgattccgggggacccctgtccagcgtggaggcggatgggcggatcttccaggccggtgtggtgagctggggagacggctgcgctcagaggaacaagccaggcgtgtacacaaggctccctctgtttcgggactggatcaaagagaacactggggtataggggccggggccacccaaatgtgtacacctgcggggccacccatcgtccaccccagtgtgcacgcctgcaggctggagactggaccgctgactgcaccagcgcccccagaacatacactgtgaactcaatctccagggctccaaatctgcctagaaaacctctcgcttcctcagcctccaaagtggagctgggaggtagaaggggaggacactggtggttctactgacccaactgggggcaaaggtttgaagacacagcctcccccgccagccccaagctgggccgaggcgcgtttgtgcatatctgcctcccctgtctctaaggagcagcgggaacggagcttcggggcctcctcagtgaaggtggtggggctgccggatctgggctgtggggcccttgggccacgctcttgaggaagcccaggctcggaggaccctggaaaacagacgggtctgagactgaaattgttttaccagctcccagggtggacttcagtgtgtgtatttgtgtaaatgagtaaaacattttatttcttttta

SEQ ID NO: 352 - protein, 27 aa, Homo sapiens
MGSDRARKGGGGPKDFGAGLKYNSRHE

SEQ ID NO: 353 - protein, 53 aa, Homo sapiens
KVNGLEEGVEFLPVNNVKKVEKHGPGRWVVLAAVLIGLLLVLLGIGFLVWHLQ

SEQ ID NO: 354 - protein, 42 aa, Homo sapiens
RDVRVQKVFNGYMRITNENFVDAYENSNSTEFVSLASKVKDA

SEQ ID NO: 355 - protein, 23 aa, Homo sapiens
LKLLYSGVPFLGPYHKESAVTAF

SEQ ID NO: 356 - protein, 52 aa, Homo sapiens
EGSVIAYYWSEFSIPQHLVEEAERVMAEERVVMLPPRARSLKSFVVTSVVAF

SEQ ID NO: 357 - protein, 11 aa, Homo sapiens
TDSKTVQRTQD

SEQ ID NO: 358 - protein, 79 aa, Homo sapiens
SCSFGLHARGVELMRFTTPGFPDSPYPAHARCQWALRGDADSVLSLTFRSFDLASCDERGSDLVTVYNTLSPMEPHALV

SEQ ID NO: 359 - protein, 46 aa, Homo sapiens
LCGTYPPSYNLTFHSSQNVLLITLITNTERRHPGFEATFFQLPRMS

SEQ ID NO: 360 - protein, 32 aa, Homo sapiens
CGGRLRKAQGTFNSPYYPGHYPPNIDCTWNIE

SEQ ID NO: 361 - protein, 36 aa, Homo sapiens
VPNNQHVKVRFKFFYLLEPGVPAGTCPKDYVEINGE

SEQ ID NO: 362 - protein, 43 aa, Homo sapiens
YCGERSQFVVTSNSNKITVRFHSDQSYTDTGFLAEYLSYDSSD

SEQ ID NO: 363 - protein, 34 aa, Homo sapiens
CPGQFTCRTGRCIRKELRCDGWADCTDHSDELNC

SEQ ID NO: 364 - protein, 36 aa, Homo sapiens
CDAGHQFTCKNKFCKPLFWVCDSVNDCGDNSDEQGC

SEQ ID NO: 365 - protein, 37 aa, Homo sapiens
CPAQTFRCSNGKCLSKSQQCNGKDDCGDGSDEASCPK

SEQ ID NO: 366 - protein, 40 aa, Homo sapiens
NVVTCTKHTYRCLNGLCLSKGNPECDGKEDCSDGSDEKDC

SEQ ID NO: 367 - protein, 61 aa, Homo sapiens
CGLRSFTRQARVVGGTDADEGEWPWQVSLHALGQGHICGASLISPNWLVSAAHCYIDDRGF

SEQ ID NO: 368 - protein, 91 aa, Homo sapiens
YSDPTQWTAFLGLHDQSQRSAPGVQERRLKRIISHPFFNDFTFDYDIALLELEKPAEYSSMVRPICLPDASHVFPAGKAIWVTGWGHTQYG

SEQ ID NO: 369 - protein, 45 aa, Homo sapiens
TGALILQKGEIRVINQTTCENLLPQQITPRMMCVGFLSGGVDSCQ

SEQ ID NO: 370 - protein, 53 aa, Homo sapiens
GDSGGPLSSVEADGRIFQAGVVSWGDGCAQRNKPGVYTRLPLFRDWIKENTGV

SEQ ID NO: 371 - protein, 855 aa, Homo sapiens [sequence omitted]

SEQ ID NO: 372 - DNA, 1552 bp, Homo sapiens
gtgagagcggagctgcagccggagaaagaggaagagggagagagagcgcgccagggcgagggcaccgccgccggtcgggcgcgctgggcctgcccggaatcccgccgcctgcgccccgcgccccgcgccctgcgggccatgggagccggccgccggcagggacgacgcctgtgagacccgcgagcggcctcggggaccatggggagcgatcgggcccgcaagggcggagggggcccgaaggacttcggcgcgggactcaagtacaactcccggcacgagaaagtgaatggcttggaggaaggcgtggagttcctgccagtcaacaacgtcaagaaggtggaaaagcatggcccggggcgctgggtggtgctggcagccgtgctgatcggcctcctcttggtcttgctggggatcggcttcctggtgtggcatttgcagtaccgggacgtgcgtgtccagaaggtcttcaatggctacatgaggatcacaaatgagaattttgtggatgcctacgagaactccaactccactgagtttgtaagcctggccagcaaggtgaaggacgcgctgaagctgctgtacagcggagtcccattcctgggcccctaccacaaggagtcggctgtgacggccttcagcgagggcagcgtcatcgcctactactggtctgagttcagcatcccgcagcacctggtggaggaggccgagcgcgtcatggccgaggagcgcgtagtcatgctgcccccgcgggcgcgctccctgaagtcctttgtggtcacctcagtggtggctttccccacggactccaaaacagtacagaggacccaggacaacagctgcagctttggcctgcacgcccgcggtgtggagctgatgcgcttcaccacgcccggcttccctgacagcccctaccccgctcatgcccgctgccagtgggccctgcggggggacgccgactcagtgctgagcctcaccttccgcagctttgaccttgcgtcctgcgacgagcgcggcagcgacctggtgacggtgtacaacaccctgagccccatggagccccacgccctggtgcagttgtgtggcacctaccctccctcctacaacctgaccttccactcctcccagaacgtcctgctcatcacactgataaccaacactgagcggcggcatcccggctttgaggccaccttcttccagctgcctaggatgagcagctgtggaggccgcttacgtaaagcccaggggacattcaacagcccctactacccaggccactacccacccaacattgactgcacatggaacattgaggtgcccaacaaccagcatgtgaaggtgcgcttcaaattcttctacctgctggagcccggcgtgcctgcgggcacctgccccaaggactacgtggagatcaacggggagaaatactgcggagagaggtcccagttcgtcgtcaccagcaacagcaacaagatcacagttcgcttccactcagatcagtcctacaccgacaccggcttcttagctgaatacctctcctacgactccagtgacc

SEQ ID NO: 373 - protein, 451 aa, Homo sapiens
MGSDRARKGGGGPKDFGAGLKYNSRHEKVNGLEEGVEFLPVNNVKKVEKHGPGRWVVLAAVLIGLLLVLLGIGFLVWHLQYRDVRVQKVFNGYMRITNENFVDAYENSNSTEFVSLASKVKDALKLLYSGVPFLGPYHKESAVTAFSEGSVIAYYWSEFSIPQHLVEEAERVMAEERVVMLPPRARSLKSFVVTSVVAFPTDSKTVQRTQDNSCSFGLHARGVELMRFTTPGFPDSPYPAHARCQWALRGDADSVLSLTFRSFDLASCDERGSDLVTVYNTLSPMEPHALVQLCGTYPPSYNLTFHSSQNVLLITLITNTERRHPGFEATFFQLPRMSSCGGRLRKAQGTFNSPYYPGHYPPNIDCTWNIEVPNNQHVKVRFKFFYLLEPGVPAGTCPKDYVEINGEKYCGERSQFVVTSNSNKITVRFHSDQSYTDTGFLAEYLSYDSSD

SEQ ID NO: 374 - DNA, 56 bp, Homo sapiens
accctgtgaaggcgaagcgcgggagaccaaagcctgcaagaaagacgcctgcccca

SEQ ID NO: 375 - DNA, 89 bp, Homo sapiens
ctacatctacatccaccactgggacaagccatcttgtaaaatgtgcggagaaggagaaaactttctgtgtgaatggaggggagtgcttc

SEQ ID NO: 376 - DNA, 145 bp, Homo sapiens
accctgtgaaggcgaagcgcgggagaccaaagcctgcaagaaagacgcctgccccactacatctacatccaccactgggacaagccatcttgtaaaatgtgcggagaaggagaaaactttctgtgtgaatggaggggagtgcttc

SEQ ID NO: 377 - protein, 48 aa, Homo sapiens
PCEGEARETKACKKDACPTTSTSTTGTSHLVKCAEKEKTFCVNGGECF

SEQ ID NO: 378 - DNA, 150 bp, Homo sapiens
agccgctgcgcccgagctggcctgcgagttcagggctcctgtcgctctccaggagcaacctctactccggacgcacaggcattccccgcgcccctccagccctcgccgccctcgccaccgctcccggccgccgcgctccggtacacacag

SEQ ID NO: 379 - DNA, 96 bp, Homo sapiens
gatccctgctgggcaccaacagctccaccatggggctggcctggggactaggcgtcctgttcctgatgcatgtgtgtggcaccaaccgcattccag

SEQ ID NO: 380 - DNA, 560 bp, Homo sapiens
agtctggcggagacaacagcgtgtttgacatctttgaactcaccggggccgcccgcaaggggtctgggcgccgactggtgaagggccccgacccttccagcccagctttccgcatcgaggatgccaacctgatcccccctgtgcctgatgacaagttccaagacctggtggatgctgtgcgggcagaaaagggtttcctccttctggcatccctgaggcagatgaagaagacccggggcacgctgctggccctggagcggaaagaccactctggccaggtcttcagcgtggtgtccaatggcaaggcgggcaccctggacctcagcctgaccgtccaaggaaagcagcacgtggtgtctgtggaagaagctctcctggcaaccggccagtggaagagcatcaccctgtttgtgcaggaagacagggcccagctgtacatcgactgtgaaaagatggagaatgctgagttggacgtccccatccaaagcgtcttcaccagagacctggccagcatcgccagactccgcatcgcaaaggggggcgtcaatgacaatttccag

SEQ ID NO: 381 - DNA, 76 bp, Homo sapiens
ggggtgctgcagaatgtgaggtttgtctttggaaccacaccagaagacatcctcaggaacaaaggctgctccagct

SEQ ID NO: 382 - DNA, 200 bp, Homo sapiens
ctaccagtgtcctcctcacccttgacaacaacgtggtgaatggttccagccctgccatccgcactaactacattggccacaagacaaaggacttgcaagccatctgcggcatctcctgtgatgagctgtccagcatggtcctggaactcaggggcctgcgcaccattgtgaccacgctgcaggacagcatccgcaaagtg

SEQ ID NO: 383 - DNA, 123 bp, Homo sapiens
actgaagagaacaaagagttggccaatgagctgaggcggcctcccctatgctatcacaacggagttcagtacagaaataacgaggaatggactgttgatagctgcactgagtgtcactgtcag

SEQ ID NO: 384 - DNA, 94 bp, Homo sapiens
aactcagttaccatctgcaaaaaggtgtcctgccccatcatgccctgctccaatgccacagttcctgatggagaatgctgtcctcgctgttggc

SEQ ID NO: 385 - DNA, 174 bp, Homo sapiens
ccagcgactctgcggacgatggctggtctccatggtccgagtggacctcctgttctacgagctgtggcaatggaattcagcagcgcggccgctcctgcgatagcctcaacaaccgatgtgagggctcctcggtccagacacggacctgccacattcaggagtgtgacaagagat

SEQ ID NO: 386 - DNA, 177 bp, Homo sapiens
ttaaacaggatggtggctggagccactggtccccgtggtcatcttgttctgtgacatgtggtgatggtgtgatcacaaggatccggctctgcaactctcccagcccccagatgaacgggaaaccctgtgaaggcgaagcgcgggagaccaaagcctgcaagaaagacgcctgcccca

SEQ ID NO: 387 - DNA, 4547 bp, Homo sapiens
ttaaacaggatggtggctggagccactggtccccgtggtcatcttgttctgtgacatgtggtgatggtgtgatcacaaggatccggctctgcaactctcccagcccccagatgaacgggaaaccctgtgaaggcgaagcgcgggagaccaaagcctgcaagaaagacgcctgccccatcaatggaggctggggtccttggtcaccatgggacatctgttctgtcacctgtggaggaggggtacagaaacgtagtcgtctctgcaacaaccccacaccccagtttggaggcaaggactgcgttggtgatgtaacagaaaaccagatctgcaacaagcaggactgtccaattgatggatgcctgtccaatccctgctttgccggcgtgaagtgtactagctaccctgatggcagctggaaatgtggtgcttgtccccctggttacagtggaaatggcatccagtgcacagatgttgatgagtgcaaagaagtgcctgatgcctgcttcaaccacaatggagagcaccggtgtgagaacacggaccccggctacaactgcctgccctgccccccacgcttcaccggctcacagcccttcggccagggtgtcgaacatgccacggccaacaaacaggtgtgcaagccccgtaacccctgcacggatgggacccacgactgcaacaagaacgccaagtgcaactacctgggccactatagcgaccccatgtaccgctgcgagtgcaagcctggctacgctggcaatggcatcatctgcggggaggacacagacctggatggctggcccaatgagaacctggtgtgcgtggccaatgcgacttaccactgcaaaaaggataattgccccaaccttcccaactcagggcaggaagactatgacaaggatggaattggtgatgcctgtgatgatgacgatgacaatgataaaattccagatgacagggacaactgtccattccattacaacccagctcagtatgactatgacagagatgatgtgggagaccgctgtgacaactgtccctacaaccacaacccagatcaggcagacacagacaacaatggggaaggagacgcctgtgctgcagacattgatggagacggtatcctcaatgaacgggacaactgccagtacgtctacaatgtggaccagagagacactgatatggatggggttggagatcagtgtgacaattgccccttggaacacaatccggatcagctggactctgactcagaccgcattggagatacctgtgacaacaatcaggatattgatgaagatggccaccagaacaatctggacaactgtccctatgtgcccaatgccaaccaggctgaccatgacaaagatggcaagggagatgcctgtgaccacgatgatgacaacgatggcattcctgatgacaaggacaactgcagactcgtgcccaatcccgaccagaaggactctgacggcgatggtcgaggtgatgcctgcaaagatgattttgaccatgacagtgtgccagacatcgatgacatctgtcctgagaatgttgacatcagtgagaccgatttccgccgattccagatgattcctctggaccccaaagggacatcccaaaatgaccctaactgggttgtacgccatcagggtaaagaactcgtccagactgtcaactgtgatcctggactcgctgtaggttatgatgagtttaatgctgtggacttcagtggcaccttcttcatcaacaccgaaagggacgatgactatgctggatttgtctttggctaccagtccagcagccgcttttatgttgtgatgtggaagcaagtcacccagtcctactgggacaccaaccccacgagggctcagggatactcgggcctttctgtgaaagttgtaaactccaccacagggcctggcgagcacctgcggaacgccctgtggcacacaggaaacacccctggccaggtgcgcaccctgtggcatgaccctcgtcacataggctggaaagatttcaccgcctacagatggcgtctcagccacaggccaaagacgggtttcattagagtggtgatgtatgaagggaagaaaatcatggctgactcaggacccatctatgataaaacctatgctggtggtagactagggttgtttgtcttctctcaagaaatggtgttcttctctgacctgaaatacgaatgtagagatccctaatcatcaaattgttgattgaaagactgatcataaaccaatgctggtattgcaccttctggaactatgggcttgagaaaacccccaggatcacttctccttggcttccttcttttctgtgcttgcatcagtgtggactcctagaacgtgcgacctgcctcaagaaaatgcagttttcaaaaacagactcagcattcagcctccaatgaataagacatcttccaagcatataaacaattgctttggtttccttttgaaaaagcatctacttgcttcagttgggaaggtgcccattccactctgcctttgtcacagagcagggtgctattgtgaggccatctctgagcagtggactcaaaagcattttcaggcatgtcagagaagggaggactcactagaattagcaaacaaaaccaccctgacatcctccttcaggaacacggggagcagaggccaaagcactaaggggagggcgcatacccgagacgattgtatgaagaaaatatggaggaactgttacatgttcggtactaagtcattttcaggggattgaaagactattgctggatttcatgatgctgactggcgttagctgattaacccatgtaaataggcacttaaatagaagcaggaaagggagacaaagactggcttctggacttcctccctgatccccacccttactcatcacctgcagtggccagaattagggaatcagaatcaaaccagtgtaaggcagtgctggctgccattgcctggtcacattgaaattggtggcttcattctagatgtagcttgtgcagatgtagcaggaaaataggaaaacctaccatctcagtgagcaccagctgcctcccaaaggaggggcagccgtgcttatatttttatggttacaatggcacaaaattattatcaacctaactaaaacattccttttctcttttttcctgaattatcatggagttttctaattctctcttttggaatgtagattttttttaaatgctttacgatgtaaaatatttattttttacttattctggaagatctggctgaaggattattcatggaacaggaagaagcgtaaagactatccatgtcatctttgttgagagtcttcgtgactgtaagattgtaaatacagattatttattaactctgttctgcctggaaatttaggcttcatacggaaagtgtttgagagcaagtagttgacatttatcagcaaatctcttgcaagaacagcacaaggaaaatcagtctaataagctgctctgccccttgtgctcagagtggatgttatgggattctttttttctctgttttatcttttcaagtggaattagttggttatccatttgcaaatgttttaaattgcaaagaaagccatgaggtcttcaatactgttttaccccatcccttgtgcatatttccagggagaaggaaagcatatacacttttttctttcatttttccaaaagagaaaaaaatgacaaaaggtgaaacttacatacaaatattacctcatttgttgtgtgactgagtaaagaatttttggatcaagcggaaagagtttaagtgtctaacaaacttaaagctactgtagtacctaaaaagtcagtgttgtacatagcataaaaactctgcagagaagtattcccaataaggaaatagcattgaaatgttaaatacaatttctgaaagttatgttttttttctatcatctggtataccattgctttatttttataaattattttctcattgccattggaatagatatctcagattgtgtagatatgctatttaaataatttatcaggaaatactgcctgtagagttagtatttctatttttatataatgtttgcacactgaattgaagaattgttggttttttcttttttttgttttgtttttttttttttttttttttgcttttgacctcccatttttactatttgccaatacctttttctaggaatgtgcttttttttgtacacatttttatccattttacattctaaagcagtgtaagttgtatattactgtttcttatgtacaaggaacaacaataaatcatatggaaatttatatttatacttactgtatccatgcttatttgttctctactggctttatgtcatgaagtatatgcgtaaataccattcataaatcaatatagcatatacaaaaataaattacagtaagtcatagcaacattcacagtttgtatgtgattgagaaagactgagttgctcaggcctaggcttagaatttgctgcgtttgtggaataaaagaacaaaatgatacattagcctgccatatcaa

SEQ ID NO: 388 - DNA, 6197 bp, Artificial Sequence
  Full mRNA polynucleotide sequence of THBS1
agccgctgcgcccgagctggcctgcgagttcagggctcctgtcgctctccaggagcaacctctactccggacgcacaggcattccccgcgcccctccagccctcgccgccctcgccaccgctcccggccgccgcgctccggtacacacaggatccctgctgggcaccaacagctccaccatggggctggcctggggactaggcgtcctgttcctgatgcatgtgtgtggcaccaaccgcattccagagtctggcggagacaacagcgtgtttgacatctttgaactcaccggggccgcccgcaaggggtctgggcgccgactggtgaagggccccgacccttccagcccagctttccgcatcgaggatgccaacctgatcccccctgtgcctgatgacaagttccaagacctggtggatgctgtgcgggcagaaaagggtttcctccttctggcatccctgaggcagatgaagaagacccggggcacgctgctggccctggagcggaaagaccactctggccaggtcttcagcgtggtgtccaatggcaaggcgggcaccctggacctcagcctgaccgtccaaggaaagcagcacgtggtgtctgtggaagaagctctcctggcaaccggccagtggaagagcatcaccctgtttgtgcaggaagacagggcccagctgtacatcgactgtgaaaagatggagaatgctgagttggacgtccccatccaaagcgtcttcaccagagacctggccagcatcgccagactccgcatcgcaaaggggggcgtcaatgacaatttccagggggtgctgcagaatgtgaggtttgtctttggaaccacaccagaagacatcctcaggaacaaaggctgctccagctctaccagtgtcctcctcacccttgacaacaacgtggtgaatggttccagccctgccatccgcactaactacattggccacaagacaaaggacttgcaagccatctgcggcatctcctgtgatgagctgtccagcatggtcctggaactcaggggcctgcgcaccattgtgaccacgctgcaggacagcatccgcaaagtgactgaagagaacaaagagttggccaatgagctgaggcggcctcccctatgctatcacaacggagttcagtacagaaataacgaggaatggactgttgatagctgcactgagtgtcactgtcagaactcagttaccatctgcaaaaaggtgtcctgccccatcatgccctgctccaatgccacagttcctgatggagaatgctgtcctcgctgttggcccagcgactctgcggacgatggctggtctccatggtccgagtggacctcctgttctacgagctgtggcaatggaattcagcagcgcggccgctcctgcgatagcctcaacaaccgatgtgagggctcctcggtccagacacggacctgccacattcaggagtgtgacaagagatttaaacaggatggtggctggagccactggtccccgtggtcatcttgttctgtgacatgtggtgatggtgtgatcacaaggatccggctctgcaactctcccagcccccagatgaacgggaaaccctgtgaaggcgaagcgcgggagaccaaagcctgcaagaaagacgcctgccccattaaacaggatggtggctggagccactggtccccgtggtcatcttgttctgtgacatgtggtgatggtgtgatcacaaggatccggctctgcaactctcccagcccccagatgaacgggaaaccctgtgaaggcgaagcgcgggagaccaaagcctgcaagaaagacgcctgccccatcaatggaggctggggtccttggtcaccatgggacatctgttctgtcacctgtggaggaggggtacagaaacgtagtcgtctctgcaacaaccccacaccccagtttggaggcaaggactgcgttggtgatgtaacagaaaaccagatctgcaacaagcaggactgtccaattgatggatgcctgtccaatccctgctttgccggcgtgaagtgtactagctaccctgatggcagctggaaatgtggtgcttgtccccctggttacagtggaaatggcatccagtgcacagatgttgatgagtgcaaagaagtgcctgatgcctgcttcaaccacaatggagagcaccggtgtgagaacacggaccccggctacaactgcctgccctgccccccacgcttcaccggctcacagcccttcggccagggtgtcgaacatgccacggccaacaaacaggtgtgcaagccccgtaacccctgcacggatgggacccacgactgcaacaagaacgccaagtgcaactacctgggccactatagcgaccccatgtaccgctgcgagtgcaagcctggctacgctggcaatggcatcatctgcggggaggacacagacctggatggctggcccaatgagaacctggtgtgcgtggccaatgcgacttaccactgcaaaaaggataattgccccaaccttcccaactcagggcaggaagactatgacaaggatggaattggtgatgcctgtgatgatgacgatgacaatgataaaattccagatgacagggacaactgtccattccattacaacccagctcagtatgactatgacagagatgatgtgggagaccgctgtgacaactgtccctacaaccacaacccagatcaggcagacacagacaacaatggggaaggagacgcctgtgctgcagacattgatggagacggtatcctcaatgaacgggacaactgccagtacgtctacaatgtggaccagagagacactgatatggatggggttggagatcagtgtgacaattgccccttggaacacaatccggatcagctggactctgactcagaccgcattggagatacctgtgacaacaatcaggatattgatgaagatggccaccagaacaatctggacaactgtccctatgtgcccaatgccaaccaggctgaccatgacaaagatggcaagggagatgcctgtgaccacgatgatgacaacgatggcattcctgatgacaaggacaactgcagactcgtgcccaatcccgaccagaaggactctgacggcgatggtcgaggtgatgcctgcaaagatgattttgaccatgacagtgtgccagacatcgatgacatctgtcctgagaatgttgacatcagtgagaccgatttccgccgattccagatgattcctctggaccccaaagggacatcccaaaatgaccctaactgggttgtacgccatcagggtaaagaactcgtccagactgtcaactgtgatcctggactcgctgtaggttatgatgagtttaatgctgtggacttcagtggcaccttcttcatcaacaccgaaagggacgatgactatgctggatttgtctttggctaccagtccagcagccgcttttatgttgtgatgtggaagcaagtcacccagtcctactgggacaccaaccccacgagggctcagggatactcgggcctttctgtgaaagttgtaaactccaccacagggcctggcgagcacctgcggaacgccctgtggcacacaggaaacacccctggccaggtgcgcaccctgtggcatgaccctcgtcacataggctggaaagatttcaccgcctacagatggcgtctcagccacaggccaaagacgggtttcattagagtggtgatgtatgaagggaagaaaatcatggctgactcaggacccatctatgataaaacctatgctggtggtagactagggttgtttgtcttctctcaagaaatggtgttcttctctgacctgaaatacgaatgtagagatccctaatcatcaaattgttgattgaaagactgatcataaaccaatgctggtattgcaccttctggaactatgggcttgagaaaacccccaggatcacttctccttggcttccttcttttctgtgcttgcatcagtgtggactcctagaacgtgcgacctgcctcaagaaaatgcagttttcaaaaacagactcagcattcagcctccaatgaataagacatcttccaagcatataaacaattgctttggtttccttttgaaaaagcatctacttgcttcagttgggaaggtgcccattccactctgcctttgtcacagagcagggtgctattgtgaggccatctctgagcagtggactcaaaagcattttcaggcatgtcagagaagggaggactcactagaattagcaaacaaaaccaccctgacatcctccttcaggaacacggggagcagaggccaaagcactaaggggagggcgcatacccgagacgattgtatgaagaaaatatggaggaactgttacatgttcggtactaagtcattttcaggggattgaaagactattgctggatttcatgatgctgactggcgttagctgattaacccatgtaaataggcacttaaatagaagcaggaaagggagacaaagactggcttctggacttcctccctgatccccacccttactcatcacctgcagtggccagaattagggaatcagaatcaaaccagtgtaaggcagtgctggctgccattgcctggtcacattgaaattggtggcttcattctagatgtagcttgtgcagatgtagcaggaaaataggaaaacctaccatctcagtgagcaccagctgcctcccaaaggaggggcagccgtgcttatatttttatggttacaatggcacaaaattattatcaacctaactaaaacattccttttctcttttttcctgaattatcatggagttttctaattctctcttttggaatgtagattttttttaaatgctttacgatgtaaaatatttattttttacttattctggaagatctggctgaaggattattcatggaacaggaagaagcgtaaagactatccatgtcatctttgttgagagtcttcgtgactgtaagattgtaaatacagattatttattaactctgttctgcctggaaatttaggcttcatacggaaagtgtttgagagcaagtagttgacatttatcagcaaatctcttgcaagaacagcacaaggaaaatcagtctaataagctgctctgccccttgtgctcagagtggatgttatgggattctttttttctctgttttatcttttcaagtggaattagttggttatccatttgcaaatgttttaaattgcaaagaaagccatgaggtcttcaatactgttttaccccatcccttgtgcatatttccagggagaaggaaagcatatacacttttttctttcatttttccaaaagagaaaaaaatgacaaaaggtgaaacttacatacaaatattacctcatttgttgtgtgactgagtaaagaatttttggatcaagcggaaagagtttaagtgtctaacaaacttaaagctactgtagtacctaaaaagtcagtgttgtacatagcataaaaactctgcagagaagtattcccaataaggaaatagcattgaaatgttaaatacaatttctgaaagttatgttttttttctatcatctggtataccattgctttatttttataaattattttctcattgccattggaatagatatctcagattgtgtagatatgctatttaaataatttatcaggaaatactgcctgtagagttagtatttctatttttatataatgtttgcacactgaattgaagaattgttggttttttcttttttttgttttgtttttttttttttttttttttgcttttgacctcccatttttactatttgccaatacctttttctaggaatgtgcttttttttgtacacatttttatccattttacattctaaagcagtgtaagttgtatattactgtttcttatgtacaaggaacaacaataaatcatatggaaatttatatttatacttactgtatccatgcttatttgttctctactggctttatgtcatgaagtatatgcgtaaataccattcataaatcaatatagcatatacaaaaataaattacagtaagtcatagcaacattcacagtttgtatgtgattgagaaagactgagttgctcaggcctaggcttagaatttgctgcgtttgtggaataaaagaacaaaatgatacattagcctgccatatcaa

SEQ ID NO: 389 - protein, 22 aa, Homo sapiens
MGLAWGLGVLFLMHVCGTNRIP

SEQ ID NO: 390 - protein, 186 aa, Homo sapiens
SGGDNSVFDIFELTGAARKGSGRRLVKGPDPSSPAFRIEDANLIPPVPDDKFQDLVDAVRAEKGFLLLASLRQMKKTRGTLLALERKDHSGQVFSVVSNGKAGTLDLSLTVQGKQHVVSVEEALLATGQWKSITLFVQEDRAQLYIDCEKMENAELDVPIQSVFTRDLASIARLRIAKGGVNDNFQ

SEQ ID NO: 391 - protein, 25 aa, Homo sapiens
GVLQNVRFVFGTTPEDILRNKGCSS

SEQ ID NO: 392 - protein, 66 aa, Homo sapiens
TSVLLTLDNNVVNGSSPAIRTNYIGHKTKDLQAICGISCDELSSMVLELRGLRTIVTTLQDSIRKV

SEQ ID NO: 393 - protein, 41 aa, Homo sapiens
TEENKELANELRRPPLCYHNGVQYRNNEEWTVDSCTECHCQ

SEQ ID NO: 394 - protein, 31 aa, Homo sapiens
NSVTICKKVSCPIMPCSNATVPDGECCPRCW

SEQ ID NO: 395 - protein, 57 aa, Homo sapiens
SDSADDGWSPWSEWTSCSTSCGNGIQQRGRSCDSLNNRCEGSSVQTRTCHIQECDKR

SEQ ID NO: 396 - protein, 58 aa, Homo sapiens
KQDGGWSHWSPWSSCSVTCGDGVITRIRLCNSPSPQMNGKPCEGEARETKACKKDACP

SEQ ID NO: 397 - protein, 738 aa, Homo sapiens
KQDGGWSHWSPWSSCSVTCGDGVITRIRLCNSPSPQMNGKPCEGEARETKACKKDACPINGGWGPWSPWDICSVTCGGGVQKRSRLCNNPTPQFGGKDCVGDVTENQICNKQDCPIDGCLSNPCFAGVKCTSYPDGSWKCGACPPGYSGNGIQCTDVDECKEVPDACFNHNGEHRCENTDPGYNCLPCPPRFTGSQPFGQGVEHATANKQVCKPRNPCTDGTHDCNKNAKCNYLGHYSDPMYRCECKPGYAGNGIICGEDTDLDGWPNENLVCVANATYHCKKDNCPNLPNSGQEDYDKDGIGDACDDDDDNDKIPDDRDNCPFHYNPAQYDYDRDDVGDRCDNCPYNHNPDQADTDNNGEGDACAADIDGDGILNERDNCQYVYNVDQRDTDMDGVGDQCDNCPLEHNPDQLDSDSDRIGDTCDNNQDIDEDGHQNNLDNCPYVPNANQADHDKDGKGDACDHDDDNDGIPDDKDNCRLVPNPDQKDSDGDGRGDACKDDFDHDSVPDIDDICPENVDISETDFRRFQMIPLDPKGTSQNDPNWVVRHQGKELVQTVNCDPGLAVGYDEFNAVDFSGTFFINTERDDDYAGFVFGYQSSSRFYVVMWKQVTQSYWDTNPTRAQGYSGLSVKVVNSTTGPGEHLRNALWHTGNTPGQVRTLWHDPRHIGWKDFTAYRWRLSHRPKTGFIRVVMYEGKKIMADSGPIYDKTYAGGRLGLFVFSQEMVFFSDLKYECRDP

SEQ ID NO: 398 - protein, 1170 aa, Homo sapiens
MGLAWGLGVLFLMHVCGTNRIPESGGDNSVFDIFELTGAARKGSGRRLVKGPDPSSPAFRIEDANLIPPVPDDKFQDLVDAVRAEKGFLLLASLRQMKKTRGTLLALERKDHSGQVFSVVSNGKAGTLDLSLTVQGKQHVVSVEEALLATGQWKSITLFVQEDRAQLYIDCEKMENAELDVPIQSVFTRDLASIARLRIAKGGVNDNFQGVLQNVRFVFGTTPEDILRNKGCSSSTSVLLTLDNNVVNGSSPAIRTNYIGHKTKDLQAICGISCDELSSMVLELRGLRTIVTTLQDSIRKVTEENKELANELRRPPLCYHNGVQYRNNEEWTVDSCTECHCQNSVTICKKVSCPIMPCSNATVPDGECCPRCWPSDSADDGWSPWSEWTSCSTSCGNGIQQRGRSCDSLNNRCEGSSVQTRTCHIQECDKRFKQDGGWSHWSPWSSCSVTCGDGVITRIRLCNSPSPQMNGKPCEGEARETKACKKDACPINGGWGPWSPWDICSVTCGGGVQKRSRLCNNPTPQFGGKDCVGDVTENQICNKQDCPIDGCLSNPCFAGVKCTSYPDGSWKCGACPPGYSGNGIQCTDVDECKEVPDACFNHNGEHRCENTDPGYNCLPCPPRFTGSQPFGQGVEHATANKQVCKPRNPCTDGTHDCNKNAKCNYLGHYSDPMYRCECKPGYAGNGIICGEDTDLDGWPNENLVCVANATYHCKKDNCPNLPNSGQEDYDKDGIGDACDDDDDNDKIPDDRDNCPFHYNPAQYDYDRDDVGDRCDNCPYNHNPDQADTDNNGEGDACAADIDGDGILNERDNCQYVYNVDQRDTDMDGVGDQCDNCPLEHNPDQLDSDSDRIGDTCDNNQDIDEDGHQNNLDNCPYVPNANQADHDKDGKGDACDHDDDNDGIPDDKDNCRLVPNPDQKDSDGDGRGDACKDDFDHDSVPDIDDICPENVDISETDFRRFQMIPLDPKGTSQNDPNWVVRHQGKELVQTVNCDPGLAVGYDEFNAVDFSGTFFINTERDDDYAGFVFGYQSSSRFYVVMWKQVTQSYWDTNPTRAQGYSGLSVKVVNSTTGPGEHLRNALWHTGNTPGQVRTLWHDPRHIGWKDFTAYRWRLSHRPKTGFIRVVMYEGKKIMADSGPIYDKTYAGGRLGLFVFSQEMVFFSDLKYECRDP

SEQ ID NO: 399 - DNA, 1650 bp, Homo sapiens
agccgctgcgcccgagctggcctgcgagttcagggctcctgtcgctctccaggagcaacctctactccggacgcacaggcattccccgcgcccctccagccctcgccgccctcgccaccgctcccggccgccgcgctccggtacacacaggatccctgctgggcaccaacagctccaccatggggctggcctggggactaggcgtcctgttcctgatgcatgtgtgtggcaccaaccgcattccagagtctggcggagacaacagcgtgtttgacatctttgaactcaccggggccgcccgcaaggggtctgggcgccgactggtgaagggccccgacccttccagcccagctttccgcatcgaggatgccaacctgatcccccctgtgcctgatgacaagttccaagacctggtggatgctgtgcgggcagaaaagggtttcctccttctggcatccctgaggcagatgaagaagacccggggcacgctgctggccctggagcggaaagaccactctggccaggtcttcagcgtggtgtccaatggcaaggcgggcaccctggacctcagcctgaccgtccaaggaaagcagcacgtggtgtctgtggaagaagctctcctggcaaccggccagtggaagagcatcaccctgtttgtgcaggaagacagggcccagctgtacatcgactgtgaaaagatggagaatgctgagttggacgtccccatccaaagcgtcttcaccagagacctggccagcatcgccagactccgcatcgcaaaggggggcgtcaatgacaatttccagggggtgctgcagaatgtgaggtttgtctttggaaccacaccagaagacatcctcaggaacaaaggctgctccagctctaccagtgtcctcctcacccttgacaacaacgtggtgaatggttccagccctgccatccgcactaactacattggccacaagacaaaggacttgcaagccatctgcggcatctcctgtgatgagctgtccagcatggtcctggaactcaggggcctgcgcaccattgtgaccacgctgcaggacagcatccgcaaagtgactgaagagaacaaagagttggccaatgagctgaggcggcctcccctatgctatcacaacggagttcagtacagaaataacgaggaatggactgttgatagctgcactgagtgtcactgtcagaactcagttaccatctgcaaaaaggtgtcctgccccatcatgccctgctccaatgccacagttcctgatggagaatgctgtcctcgctgttggcccagcgactctgcggacgatggctggtctccatggtccgagtggacctcctgttctacgagctgtggcaatggaattcagcagcgcggccgctcctgcgatagcctcaacaaccgatgtgagggctcctcggtccagacacggacctgccacattcaggagtgtgacaagagatttaaacaggatggtggctggagccactggtccccgtggtcatcttgttctgtgacatgtggtgatggtgtgatcacaaggatccggctctgcaactctcccagcccccagatgaacgggaaaccctgtgaaggcgaagcgcgggagaccaaagcctgcaagaaagacgcctgcccca

SEQ ID NO: 400 - protein, 490 aa, Homo sapiens
MGLAWGLGVLFLMHVCGTNRIPESGGDNSVFDIFELTGAARKGSGRRLVKGPDPSSPAFRIEDANLIPPVPDDKFQDLVDAVRAEKGFLLLASLRQMKKTRGTLLALERKDHSGQVFSVVSNGKAGTLDLSLTVQGKQHVVSVEEALLATGQWKSITLFVQEDRAQLYIDCEKMENAELDVPIQSVFTRDLASIARLRIAKGGVNDNFQGVLQNVRFVFGTTPEDILRNKGCSSSTSVLLTLDNNVVNGSSPAIRTNYIGHKTKDLQAICGISCDELSSMVLELRGLRTIVTTLQDSIRKVTEENKELANELRRPPLCYHNGVQYRNNEEWTVDSCTECHCQNSVTICKKVSCPIMPCSNATVPDGECCPRCWPSDSADDGWSPWSEWTSCSTSCGNGIQQRGRSCDSLNNRCEGSSVQTRTCHIQECDKRFKQDGGWSHWSPWSSCSVTCGDGVITRIRLCNSPSPQMNGKPCEGEARETKACKKDACP

SEQ ID NO: 401 - DNA, 106 bp, Homo sapiens
gtgtgcggctcagatggggtcacctacagcaccgagtgtgagctgaagaaggccaggtgtgagtcacagcgagggctctacgtagcggcccagggagcctgccgag

SEQ ID NO: 402 - DNA, 101 bp, Homo sapiens
ctacatctacatccaccactgggacaagccatcttgtaaaatgtgcggagaaggagaaaactttctgtgtgaatggaggggagtgcttcatggtgaaagac

SEQ ID NO: 403 - DNA, 207 bp, Homo sapiens
gtgtgcggctcagatggggtcacctacagcaccgagtgtgagctgaagaaggccaggtgtgagtcacagcgagggctctacgtagcggcccagggagcctgccgagctacatctacatccaccactgggacaagccatcttgtaaaatgtgcggagaaggagaaaactttctgtgtgaatggaggggagtgcttcatggtgaaagac

SEQ ID NO: 404 - protein, 69 aa, Homo sapiens
VCGSDGVTYSTECELKKARCESQRGLYVAAQGACRATSTSTTGTSHLVKCAEKEKTFCVNGGECFMVKD

SEQ ID NO: 405 - DNA, 254 bp, Homo sapiens
agtcccgtccccggcgcggcccgcgcgctcctccgccgcctctcgcctgcgccatggccggccggtcccacccgggcccgctgcggccgctgctgccgctccttgtggtggccgcgtgcgtcctgcccggagccggcgggacatgcccggagcgcgcgctggagcggcgcgaggaggaggcgaacgtggtgctcaccgggacggtggaggagatcctcaacgtggacccggtgcagcacacgtactcctgcaag

SEQ ID NO: 406 - DNA, 262 bp, Homo sapiens
gttcgggtctggcggtacttgaagggcaaagacctggtggcccgggagagcctgctggacggcggcaacaaggtggtgatcagcggctttggagaccccctcatctgtgacaaccaggtgtccactggggacaccaggatcttctttgtgaaccctgcacccccatacctgtggccagcccacaagaacgagctgatgctcaactccagcctcatgcggatcaccctgcggaacctggaggaggtggagttctgtgtggaag

SEQ ID NO: 407 - DNA, 48 bp, Homo sapiens
ataaacccgggacccacttcactccagtgcctccgacgcctcctgatg

SEQ ID NO: 408 - DNA, 216 bp, Homo sapiens
cgtgccggggaatgctgtgcggcttcggcgccgtgtgcgagcccaacgcggaggggccgggccgggcgtcctgcgtctgcaagaagagcccgtgccccagcgtggtggcgcctgtgtgtgggtcggacgcctccacctacagcaacgaatgcgagctgcagcgggcgcagtgcagccagcagcgccgcatccgcctgctcagccgcgggccgtgcg

SEQ ID NO: 409 - DNA, 225 bp, Homo sapiens
gctcgcgggacccctgctccaacgtgacctgcagcttcggcagcacctgtgcgcgctcggccgacgggctgacggcctcgtgcctgtgccccgcgacctgccgtggcgcccccgaggggaccgtctgcggcagcgacggcgccgactaccccggcgagtgccagctcctgcgccgcgcctgcgcccgccaggagaatgtcttcaagaagttcgacggcccttgtg

SEQ ID NO: 410 - DNA, 225 bp, Homo sapiens
acccctgtcagggcgccctccctgacccgagccgcagctgccgtgtgaacccgcgcacgcggcgccctgagatgctcctacggcccgagagctgccctgcccggcaggcgccagtgtgtggggacgacggagtcacctacgaaaacgactgtgtcatgggccgatcgggggccgcccggggtctcctcctgcagaaagtgcgctccggccagtgccagggtcgag

SEQ ID NO: 411 - DNA, 207 bp, Homo sapiens
accagtgcccggagccctgccggttcaatgccgtgtgcctgtcccgccgtggccgtccccgctgctcctgcgaccgcgtcacctgtgacggggcctacaggcccgtgtgtgcccaggacgggcgcacgtatgacagtgattgctggcggcagcaggctgagtgccggcagcagcgtgccatccccagcaagcaccagggcccgtgtg

SEQ ID NO: 412 - DNA, 219 bp, Homo sapiens
accaggccccgtccccatgcctcggggtgcagtgtgcatttggggcgacgtgtgctgtgaagaacgggcaggcagcgtgtgaatgcctgcaggcgtgctcgagcctctacgatcctgtgtgcggcagcgacggcgtcacatacggcagcgcgtgcgagctggaggccacggcctgtaccctcgggcgggagatccaggtggcgcgcaaaggaccctgtg

SEQ ID NO: 413 - DNA, 195 bp, Homo sapiens
accgctgcgggcagtgccgctttggagccctgtgcgaggccgagaccgggcgctgcgtgtgcccctctgaatgcgtggctttggcccagcccgtgtgtggctccgacgggcacacgtaccccagcgagtgcatgctgcacgtgcacgcctgcacacaccagatcagcctgcacgtggcctcagctggaccctgtg

SEQ ID NO: 414 - DNA, 201 bp, Homo sapiens
agacctgtggagatgccgtgtgtgcttttggggctgtgtgctccgcagggcagtgtgtgtgtccccggtgtgagcaccccccgcccggccccgtgtgtggcagcgacggtgtcacctacggcagtgcctgcgagctacgggaagccgcctgcctccagcagacacagatcgaggaggcccgggcagggccgtgcgagcagg

SEQ ID NO: 415 - DNA, 149 bp, Homo sapiens
ccgagtgcggttccggaggctctggctctggggaggacggtgactgtgagcaggagctgtgccggcagcgcggtggcatctgggacgaggactcggaggacgggccgtgtgtctgtgacttcagctgccagagtgtcccaggcagcccg

SEQ ID NO: 416 - DNA, 106 bp, Homo sapiens; identical to SEQ ID NO: 401

SEQ ID NO: 417 - DNA, 5088 bp, Homo sapiens
gccccaccttcgccccgctgccgcctgtggcccccttacactgtgcccagacgccctacggctgctgccaggacaatatcaccgcagcccggggcgtgggcctggctggctgccccagtgcctgccagtgcaacccccatggctcttacggcggcacctgtgacccagccacaggccagtgctcctgccgcccaggtgtggggggcctcaggtgtgaccgctgtgagcctggcttctggaactttcgaggcatcgtcaccgatggccggagtggctgtacaccctgcagctgtgatccccaaggcgccgtgcgggatgactgtgagcagatgacggggctgtgctcgtgtaagcccggggtggctggacccaagtgtgggcagtgtccagacggccgtgccctgggccccgcgggctgtgaagctgacgcttctgcgcctgcgacctgtgcggagatgcgctgtgagttcggtgcgcggtgcgtggaggagtctggctcagcccactgtgtctgcccgatgctcacctgtccagaggccaacgctaccaaggtctgtgggtcagatggagtcacatacggcaacgagtgtcagctgaagaccatcgcctgccgccagggcctgcaaatctctatccagagcctgggcccgtgccaggaggctgttgctcccagcactcacccgacatctgcctccgtgactgtgaccaccccagggctcctcctgagccaggcactgccggccccccccggcgccctccccctggctcccagcagtaccgcacacagccagaccacccctccgccctcatcacgacctcggaccactgccagcgtccccaggaccaccgtgtggcccgtgctgacggtgccccccacggcaccctcccctgcacccagcctggtggcgtccgcctttggtgaatctggcagcactgatggaagcagcgatgaggaactgagcggggaccaggaggccagtgggggtggctctggggggctcgagcccttggagggcagcagcgtggccacccctgggccacctgtcgagagggcttcctgctacaactccgcgttgggctgctgctctgatgggaagacgccctcgctggacgcagagggctccaactgccccgccaccaaggtgttccagggcgtcctggagctggagggcgtcgagggccaggagctgttctacacgcccgagatggctgaccccaagtcagaactgttcggggagacagccaggagcattgagagcaccctggacgacctcttccggaattcagacgtcaagaaggattttcggagtgtccgcttgcgggacctggggcccggcaaatccgtccgcgccattgtggatgtgcactttgaccccaccacagccttcagggcacccgacgtggcccgggccctgctccggcagatccaggtgtccaggcgccggtccttgggggtgaggcggccgctgcaggagcacgtgcgatttatggactttgactggtttcctgcgtttatcacgggggccacgtcaggagccattgctgcgggagccacggccagagccaccactgcatcgcgcctgccgtcctctgctgtgacccctcgggccccgcaccccagtcacacaagccagcccgttgccaagaccacggcagcccccaccacacgtcggccccccaccactgcccccagccgtgtgcccggacgtcggcccccggccccccagcagcctccaaagccctgtgactcacagccctgcttccacggggggacctgccaggactgggcattgggcgggggcttcacctgcagctgcccggcaggcaggggaggcgccgtctgtgagaaggtgcttggcgcccctgtgccggccttcgagggccgctccttcctggccttccccactctccgcgcctaccacacgctgcgcctggcactggaattccgggcgctggagcctcaggggctgctgctgtacaatggcaacgcccggggcaaggacttcctggcattggcgctgctagatggccgcgtgcagctcaggtttgacacaggttcggggccggcggtgctgaccagtgccgtgccggtagagccgggccagtggcaccgcctggagctgtcccggcactggcgccggggcaccctctcggtggatggtgagacccctgttctgggcgagagtcccagtggcaccgacggcctcaacctggacacagacctctttgtgggcggcgtacccgaggaccaggctgccgtggcgctggagcggaccttcgtgggcgccggcctgagggggtgcatccgtttgctggacgtcaacaaccagcgcctggagcttggcattgggccgggggctgccacccgaggctctggcgtgggcgagtgcggggaccacccctgcctgcccaacccctgccatggcggggccccatgccagaacctggaggctggaaggttccattgccagtgcccgcccggccgcgtcggaccaacctgtgccgatgagaagagcccctgccagcccaacccctgccatggggcggcgccctgccgtgtgctgcccgagggtggtgctcagtgcgagtgccccctggggcgtgagggcaccttctgccagacagcctcggggcaggacggctctgggcccttcctggctgacttcaacggcttctcccacctggagctgagaggcctgcacacctttgcacgggacctgggggagaagatggcgctggaggtcgtgttcctggcacgaggccccagcggcctcctgctctacaacgggcagaagacggacggcaagggggacttcgtgtcgctggcactgcgggaccgccgcctggagttccgctacgacctgggcaagggggcagcggtcatcaggagcagggagccagtcaccctgggagcctggaccagggtctcactggagcgaaacggccgcaagggtgccctgcgtgtgggcgacggcccccgtgtgttgggggagtccccgaaatcccgcaaggttccgcacaccgtcctcaacctgaaggagccgctctacgtagggggcgctcccgacttcagcaagctggcccgtgctgctgccgtgtcctctggcttcgacggtgccatccagctggtctccctcggaggccgccagctgctgaccccggagcacgtgctgcggcaggtggacgtcacgtcctttgcaggtcacccctgcacccgggcctcaggccacccctgcctcaatggggcctcctgcgtcccgagggaggctgcctatgtgtgcctgtgtcccgggggattctcaggaccgcactgcgagaaggggctggtggagaagtcagcgggggacgtggataccttggcctttgacgggcggacctttgtcgagtacctcaacgctgtgaccgagagcgaactggccaatgagatccccgtccccgaaactctggattccggggcccttcacagcgagaaggcactgcagagcaaccactttgaactgagcctgcgcactgaggccacgcaggggctggtgctctggagtggcaaggccacggagcgggcagactatgtggcactggccattgtggacgggcacctgcaactgagctacaacctgggctcccagcccgtggtgctgcgttccaccgtgcccgtcaacaccaaccgctggttgcgggtcgtggcacatagggagcagagggaaggttccctgcaggtgggcaatgaggcccctgtgaccggctcctccccgctgggcgccacgcagctggacactgatggagccctgtggcttgggggcctgccggagctgcccgtgggcccagcactgcccaaggcctacggcacaggctttgtgggctgcttgcgggacgtggtggtgggccggcacccgctgcacctgctggaggacgccgtcaccaagccagagctgcggccctgccccaccccatgagctggcaccagagccccgcgcccgctgtaattattttctatttttgtaaacttgttgctttttgatatgattttcttgcctgagtgttggccggagggactgctggcccggcctcccttccgtccaggcagccgtgctgcagacagacctagtgccgagggatggacaggcgaggtggcagcgtggagggctcggcgtggatggcagcctcaggacacacacccctgcctcaaggtgctgagcccccgccttgcactgcgcctgccccacggtgtccccgccgggaagcagccccggctcctgaatcaccctcgctccgtcaggcgggactcgtgtcccagagaggaaggggctgctgaggtctgatggggcccttcctccgggtgaccccacagggcctttccaagcccccatttgagctgctccttcctgtgtgtgctctgggccctgcctcggcctcctgcgccaatactgtgacttccaaacaatgttactgctgggcacagctctgcgttgctcccgtgctgcctgcgccagccccaggctgctgaggagcagaggccagaccagggccgatctgggtgtcctgaccctcagctggccctgcccagccaccctggacgtgaccgtatccctctgccacaccccaggccctgcgaggggctatcgagaggagctcactgtgggatggggttgacctctgccgcctgcctgggtatctgggcctggccatggctgtgttcttcatgtgttgattttatttgacccctggagtggtgggtctcatctttcccatctcgcctgagagcggctgagggctgcctcactgcaaatcctccccacagcgtcagtgaaagtcgtccttgtctcagaatgaccaggggccagccagtgtctgaccaaggtcaaggggcaggtgcagaggtggcagggatggctccgaagccagaaatgccttaaactgcaacgtcccgtcccttccccacccccatcccatccccacccccagccccagcccagtcctcctaggagcaggacccgatgaagcgggcggcggtggggctgggtgccgtgttactaactctagtatgtttctgtgtcaatcgctgtgaaataaagtctgaaaactttaaaa

SEQ ID NO: 418 - DNA, 7395 bp, Artificial Sequence
  Full mRNA polynucleotide sequence of AGRN
agtcccgtccccggcgcggcccgcgcgctcctccgccgcctctcgcctgcgccatggccggccggtcccacccgggcccgctgcggccgctgctgccgctccttgtggtggccgcgtgcgtcctgcccggagccggcgggacatgcccggagcgcgcgctggagcggcgcgaggaggaggcgaacgtggtgctcaccgggacggtggaggagatcctcaacgtggacccggtgcagcacacgtactcctgcaaggttcgggtctggcggtacttgaagggcaaagacctggtggcccgggagagcctgctggacggcggcaacaaggtggtgatcagcggctttggagaccccctcatctgtgacaaccaggtgtccactggggacaccaggatcttctttgtgaaccctgcacccccatacctgtggccagcccacaagaacgagctgatgctcaactccagcctcatgcggatcaccctgcggaacctggaggaggtggagttctgtgtggaagataaacccgggacccacttcactccagtgcctccgacgcctcctgatgcgtgccggggaatgctgtgcggcttcggcgccgtgtgcgagcccaacgcggaggggccgggccgggcgtcctgcgtctgcaagaagagcccgtgccccagcgtggtggcgcctgtgtgtgggtcggacgcctccacctacagcaacgaatgcgagctgcagcgggcgcagtgcagccagcagcgccgcatccgcctgctcagccgcgggccgtgcggctcgcgggacccctgctccaacgtgacctgcagcttcggcagcacctgtgcgcgctcggccgacgggctgacggcctcgtgcctgtgccccgcgacctgccgtggcgcccccgaggggaccgtctgcggcagcgacggcgccgactaccccggcgagtgccagctcctgcgccgcgcctgcgcccgccaggagaatgtcttcaagaagttcgacggcccttgtgacccctgtcagggcgccctccctgacccgagccgcagctgccgtgtgaacccgcgcacgcggcgccctgagatgctcctacggcccgagagctgccctgcccggcaggcgccagtgtgtggggacgacggagtcacctacgaaaacgactgtgtcatgggccgatcgggggccgcccggggtctcctcctgcagaaagtgcgctccggccagtgccagggtcgagaccagtgcccggagccctgccggttcaatgccgtgtgcctgtcccgccgtggccgtccccgctgctcctgcgaccgcgtcacctgtgacggggcctacaggcccgtgtgtgcccaggacgggcgcacgtatgacagtgattgctggcggcagcaggctgagtgccggcagcagcgtgccatccccagcaagcaccagggcccgtgtgaccaggccccgtccccatgcctcggggtgcagtgtgcatttggggcgacgtgtgctgtgaagaacgggcaggcagcgtgtgaatgcctgcaggcgtgctcgagcctctacgatcctgtgtgcggcagcgacggcgtcacatacggcagcgcgtgcgagctggaggccacggcctgtaccctcgggcgggagatccaggtggcgcgcaaaggaccctgtgaccgctgcgggcagtgccgctttggagccctgtgcgaggccgagaccgggcgctgcgtgtgcccctctgaatgcgtggctttggcccagcccgtgtgtggctccgacgggcacacgtaccccagcgagtgcatgctgcacgtgcacgcctgcacacaccagatcagcctgcacgtggcctcagctggaccctgtgagacctgtggagatgccgtgtgtgcttttggggctgtgtgctccgcagggcagtgtgtgtgtccccggtgtgagcaccccccgcccggccccgtgtgtggcagcgacggtgtcacctacggcagtgcctgcgagctacgggaagccgcctgcctccagcagacacagatcgaggaggcccgggcagggccgtgcgagcaggccgagtgcggttccggaggctctggctctggggaggacggtgactgtgagcaggagctgtgccggcagcgcggtggcatctgggacgaggactcggaggacgggccgtgtgtctgtgacttcagctgccagagtgtcccaggcagcccggtgtgcggctcagatggggtcacctacagcaccgagtgtgagctgaagaaggccaggtgtgagtcacagcgagggctctacgtagcggcccagggagcctgccgaggccccaccttcgccccgctgccgcctgtggcccccttacactgtgcccagacgccctacggctgctgccaggacaatatcaccgcagcccggggcgtgggcctggctggctgccccagtgcctgccagtgcaacccccatggctcttacggcggcacctgtgacccagccacaggccagtgctcctgccgcccaggtgtggggggcctcaggtgtgaccgctgtgagcctggcttctggaactttcgaggcatcgtcaccgatggccggagtggctgtacaccctgcagctgtgatccccaaggcgccgtgcgggatgactgtgagcagatgacggggctgtgctcgtgtaagcccggggtggctggacccaagtgtgggcagtgtccagacggccgtgccctgggccccgcgggctgtgaagctgacgcttctgcgcctgcgacctgtgcggagatgcgctgtgagttcggtgcgcggtgcgtggaggagtctggctcagcccactgtgtctgcccgatgctcacctgtccagaggccaacgctaccaaggtctgtgggtcagatggagtcacatacggcaacgagtgtcagctgaagaccatcgcctgccgccagggcctgcaaatctctatccagagcctgggcccgtgccaggaggctgttgctcccagcactcacccgacatctgcctccgtgactgtgaccaccccagggctcctcctgagccaggcactgccggccccccccggcgccctccccctggctcccagcagtaccgcacacagccagaccacccctccgccctcatcacgacctcggaccactgccagcgtccccaggaccaccgtgtggcccgtgctgacggtgccccccacggcaccctcccctgcacccagcctggtggcgtccgcctttggtgaatctggcagcactgatggaagcagcgatgaggaactgagcggggaccaggaggccagtgggggtggctctggggggctcgagcccttggagggcagcagcgtggccacccctgggccacctgtcgagagggcttcctgctacaactccgcgttgggctgctgctctgatgggaagacgccctcgctggacgcagagggctccaactgccccgccaccaaggtgttccagggcgtcctggagctggagggcgtcgagggccaggagctgttctacacgcccgagatggctgaccccaagtcagaactgttcggggagacagccaggagcattgagagcaccctggacgacctcttccggaattcagacgtcaagaaggattttcggagtgtccgcttgcgggacctggggcccggcaaatccgtccgcgccattgtggatgtgcactttgaccccaccacagccttcagggcacccgacgtggcccgggccctgctccggcagatccaggtgtccaggcgccggtccttgggggtgaggcggccgctgcaggagcacgtgcgatttatggactttgactggtttcctgcgtttatcacgggggccacgtcaggagccattgctgcgggagccacggccagagccaccactgcatcgcgcctgccgtcctctgctgtgacccctcgggccccgcaccccagtcacacaagccagcccgttgccaagaccacggcagcccccaccacacgtcggccccccaccactgcccccagccgtgtgcccggacgtcggcccccggccccccagcagcctccaaagccctgtgactcacagccctgcttccacggggggacctgccaggactgggcattgggcgggggcttcacctgcagctgcccggcaggcaggggaggcgccgtctgtgagaaggtgcttggcgcccctgtgccggccttcgagggccgctccttcctggccttccccactctccgcgcctaccacacgctgcgcctggcactggaattccgggcgctggagcctcaggggctgctgctgtacaatggcaacgcccggggcaaggacttcctggcattggcgctgctagatggccgcgtgcagctcaggtttgacacaggttcggggccggcggtgctgaccagtgccgtgccggtagagccgggccagtggcaccgcctggagctgtcccggcactggcgccggggcaccctctcggtggatggtgagacccctgttctgggcgagagtcccagtggcaccgacggcctcaacctggacacagacctctttgtgggcggcgtacccgaggaccaggctgccgtggcgctggagcggaccttcgtgggcgccggcctgagggggtgcatccgtttgctggacgtcaacaaccagcgcctggagcttggcattgggccgggggctgccacccgaggctctggcgtgggcgagtgcggggaccacccctgcctgcccaacccctgccatggcggggccccatgccagaacctggaggctggaaggttccattgccagtgcccgcccggccgcgtcggaccaacctgtgccgatgagaagagcccctgccagcccaacccctgccatggggcggcgccctgccgtgtgctgcccgagggtggtgctcagtgcgagtgccccctggggcgtgagggcaccttctgccagacagcctcggggcaggacggctctgggcccttcctggctgacttcaacggcttctcccacctggagctgagaggcctgcacacctttgcacgggacctgggggagaagatggcgctggaggtcgtgttcctggcacgaggccccagcggcctcctgctctacaacgggcagaagacggacggcaagggggacttcgtgtcgctggcactgcgggaccgccgcctggagttccgctacgacctgggcaagggggcagcggtcatcaggagcagggagccagtcaccctgggagcctggaccagggtctcactggagcgaaacggccgcaagggtgccctgcgtgtgggcgacggcccccgtgtgttgggggagtccccgaaatcccgcaaggttccgcacaccgtcctcaacctgaaggagccgctctacgtagggggcgctcccgacttcagcaagctggcccgtgctgctgccgtgtcctctggcttcgacggtgccatccagctggtctccctcggaggccgccagctgctgaccccggagcacgtgctgcggcaggtggacgtcacgtcctttgcaggtcacccctgcacccgggcctcaggccacccctgcctcaatggggcctcctgcgtcccgagggaggctgcctatgtgtgcctgtgtcccgggggattctcaggaccgcactgcgagaaggggctggtggagaagtcagcgggggacgtggataccttggcctttgacgggcggacctttgtcgagtacctcaacgctgtgaccgagagcgaactggccaatgagatccccgtccccgaaactctggattccggggcccttcacagcgagaaggcactgcagagcaaccactttgaactgagcctgcgcactgaggccacgcaggggctggtgctctggagtggcaaggccacggagcgggcagactatgtggcactggccattgtggacgggcacctgcaactgagctacaacctgggctcccagcccgtggtgctgcgttccaccgtgcccgtcaacaccaaccgctggttgcgggtcgtggcacatagggagcagagggaaggttccctgcaggtgggcaatgaggcccctgtgaccggctcctccccgctgggcgccacgcagctggacactgatggagccctgtggcttgggggcctgccggagctgcccgtgggcccagcactgcccaaggcctacggcacaggctttgtgggctgcttgcgggacgtggtggtgggccggcacccgctgcacctgctggaggacgccgtcaccaagccagagctgcggccctgccccaccccatgagctggcaccagagccccgcgcccgctgtaattattttctatttttgtaaacttgttgctttttgatatgattttcttgcctgagtgttggccggagggactgctggcccggcctcccttccgtccaggcagccgtgctgcagacagacctagtgccgagggatggacaggcgaggtggcagcgtggagggctcggcgtggatggcagcctcaggacacacacccctgcctcaaggtgctgagcccccgccttgcactgcgcctgccccacggtgtccccgccgggaagcagccccggctcctgaatcaccctcgctccgtcaggcgggactcgtgtcccagagaggaaggggctgctgaggtctgatggggcccttcctccgggtgaccccacagggcctttccaagcccccatttgagctgctccttcctgtgtgtgctctgggccctgcctcggcctcctgcgccaatactgtgacttccaaacaatgttactgctgggcacagctctgcgttgctcccgtgctgcctgcgccagccccaggctgctgaggagcagaggccagaccagggccgatctgggtgtcctgaccctcagctggccctgcccagccaccctggacgtgaccgtatccctctgccacaccccaggccctgcgaggggctatcgagaggagctcactgtgggatggggttgacctctgccgcctgcctgggtatctgggcctggccatggctgtgttcttcatgtgttgattttatttgacccctggagtggtgggtctcatctttcccatctcgcctgagagcggctgagggctgcctcactgcaaatcctccccacagcgtcagtgaaagtcgtccttgtctcagaatgaccaggggccagccagtgtctgaccaaggtcaaggggcaggtgcagaggtggcagggatggctccgaagccagaaatgccttaaactgcaacgtcccgtcccttccccacccccatcccatccccacccccagccccagcccagtcctcctaggagcaggacccgatgaagcgggcggcggtggggctgggtgccgtgttactaactctagtatgtttctgtgtcaatcgctgtgaaataaagtctgaaaactttaaaa

SEQ ID NO: 419 - protein, 67 aa, Homo sapiens
MAGRSHPGPLRPLLPLLVVAACVLPGAGGTCPERALERREEEANVVLTGTVEEILNVDPVQHTYSCK

SEQ ID NO: 420 - protein, 87 aa, Homo sapiens
VRVWRYLKGKDLVARESLLDGGNKVVISGFGDPLICDNQVSTGDTRIFFVNPAPPYLWPAHKNELMLNSSLMRITLRNLEEVEFCVE

SEQ ID NO: 421 - protein, 15 aa, Homo sapiens
KPGTHFTPVPPTPPD

SEQ ID NO: 422 - protein, 71 aa, Homo sapiens
CRGMLCGFGAVCEPNAEGPGRASCVCKKSPCPSVVAPVCGSDASTYSNECELQRAQCSQQRRIRLLSRGPC

SEQ ID NO: 423 - protein, 74 aa, Homo sapiens
SRDPCSNVTCSFGSTCARSADGLTASCLCPATCRGAPEGTVCGSDGADYPGECQLLRRACARQENVFKKFDGPC

SEQ ID NO: 424 - protein, 74 aa, Homo sapiens
PCQGALPDPSRSCRVNPRTRRPEMLLRPESCPARQAPVCGDDGVTYENDCVMGRSGAARGLLLQKVRSGQCQGR

SEQ ID NO: 425 - protein, 68 aa, Homo sapiens
QCPEPCRFNAVCLSRRGRPRCSCDRVTCDGAYRPVCAQDGRTYDSDCWRQQAECRQQRAIPSKHQGPC

SEQ ID NO: 426 - protein, 72 aa, Homo sapiens
QAPSPCLGVQCAFGATCAVKNGQAACECLQACSSLYDPVCGSDGVTYGSACELEATACTLGREIQVARKGPC

SEQ ID NO: 427 - protein, 64 aa, Homo sapiens
RCGQCRFGALCEAETGRCVCPSECVALAQPVCGSDGHTYPSECMLHVHACTHQISLHVASAGPC

SEQ ID NO: 428 - protein, 66 aa, Homo sapiens
TCGDAVCAFGAVCSAGQCVCPRCEHPPPGPVCGSDGVTYGSACELREAACLQQTQIEEARAGPCEQ

SEQ ID NO: 429 - protein, 49 aa, Homo sapiens
ECGSGGSGSGEDGDCEQELCRQRGGIWDEDSEDGPCVCDFSCQSVPGSP

SEQ ID NO: 430 - protein, 35 aa, Homo sapiens
VCGSDGVTYSTECELKKARCESQRGLYVAAQGACR

SEQ ID NO: 431 - protein, 1352 aa, Homo sapiens
VCGSDGVTYSTECELKKARCESQRGLYVAAQGACRGPTFAPLPPVAPLHCAQTPYGCCQDNITAARGVGLAGCPSACQCNPHGSYGGTCDPATGQCSCRPGVGGLRCDRCEPGFWNFRGIVTDGRSGCTPCSCDPQGAVRDDCEQMTGLCSCKPGVAGPKCGQCPDGRALGPAGCEADASAPATCAEMRCEFGARCVEESGSAHCVCPMLTCPEANATKVCGSDGVTYGNECQLKTIACRQGLQISIQSLGPCQEAVAPSTHPTSASVTVTTPGLLLSQALPAPPGALPLAPSSTAHSQTTPPPSSRPRTTASVPRTTVWPVLTVPPTAPSPAPSLVASAFGESGSTDGSSDEELSGDQEASGGGSGGLEPLEGSSVATPGPPVERASCYNSALGCCSDGKTPSLDAEGSNCPATKVFQGVLELEGVEGQELFYTPEMADPKSELFGETARSIESTLDDLFRNSDVKKDFRSVRLRDLGPGKSVRAIVDVHFDPTTAFRAPDVARALLRQIQVSRRRSLGVRRPLQEHVRFMDFDWFPAFITGATSGAIAAGATARATTASRLPSSAVTPRAPHPSHTSQPVAKTTAAPTTRRPPTTAPSRVPGRRPPAPQQPPKPCDSQPCFHGGTCQDWALGGGFTCSCPAGRGGAVCEKVLGAPVPAFEGRSFLAFPTLRAYHTLRLALEFRALEPQGLLLYNGNARGKDFLALALLDGRVQLRFDTGSGPAVLTSAVPVEPGQWHRLELSRHWRRGTLSVDGETPVLGESPSGTDGLNLDTDLFVGGVPEDQAAVALERTFVGAGLRGCIRLLDVNNQRLELGIGPGAATRGSGVGECGDHPCLPNPCHGGAPCQNLEAGRFHCQCPPGRVGPTCADEKSPCQPNPCHGAAPCRVLPEGGAQCECPLGREGTFCQTASGQDGSGPFLADFNGFSHLELRGLHTFARDLGEKMALEVVFLARGPSGLLLYNGQKTDGKGDFVSLALRDRRLEFRYDLGKGAAVIRSREPVTLGAWTRVSLERNGRKGALRVGDGPRVLGESPKSRKVPHTVLNLKEPLYVGGAPDFSKLARAAAVSSGFDGAIQLVSLGGRQLLTPEHVLRQVDVTSFAGHPCTRASGHPCLNGASCVPREAAYVCLCPGGFSGPHCEKGLVEKSAGDVDTLAFDGRTFVEYLNAVTESELANEIPVPETLDSGALHSEKALQSNHFELSLRTEATQGLVLWSGKATERADYVALAIVDGHLQLSYNLGSQPVVLRSTVPVNTNRWLRVVAHREQREGSLQVGNEAPVTGSSPLGATQLDTDGALWLGGLPELPVGPALPKAYGTGFVGCLRDVVVGRHPLHLLEDAVTKPELRPCPTP

SEQ ID NO: 432 - protein, 2068 aa, Homo sapiens
MAGRSHPGPLRPLLPLLVVAACVLPGAGGTCPERALERREEEANVVLTGTVEEILNVDPVQHTYSCKVRVWRYLKGKDLVARESLLDGGNKVVISGFGDPLICDNQVSTGDTRIFFVNPAPPYLWPAHKNELMLNSSLMRITLRNLEEVEFCVEDKPGTHFTPVPPTPPDACRGMLCGFGAVCEPNAEGPGRASCVCKKSPCPSVVAPVCGSDASTYSNECELQRAQCSQQRRIRLLSRGPCGSRDPCSNVTCSFGSTCARSADGLTASCLCPATCRGAPEGTVCGSDGADYPGECQLLRRACARQENVFKKFDGPCDPCQGALPDPSRSCRVNPRTRRPEMLLRPESCPARQAPVCGDDGVTYENDCVMGRSGAARGLLLQKVRSGQCQGRDQCPEPCRFNAVCLSRRGRPRCSCDRVTCDGAYRPVCAQDGRTYDSDCWRQQAECRQQRAIPSKHQGPCDQAPSPCLGVQCAFGATCAVKNGQAACECLQACSSLYDPVCGSDGVTYGSACELEATACTLGREIQVARKGPCDRCGQCRFGALCEAETGRCVCPSECVALAQPVCGSDGHTYPSECMLHVHACTHQISLHVASAGPCETCGDAVCAFGAVCSAGQCVCPRCEHPPPGPVCGSDGVTYGSACELREAACLQQTQIEEARAGPCEQAECGSGGSGSGEDGDCEQELCRQRGGIWDEDSEDGPCVCDFSCQSVPGSPVCGSDGVTYSTECELKKARCESQRGLYVAAQGACRGPTFAPLPPVAPLHCAQTPYGCCQDNITAARGVGLAGCPSACQCNPHGSYGGTCDPATGQCSCRPGVGGLRCDRCEPGFWNFRGIVTDGRSGCTPCSCDPQGAVRDDCEQMTGLCSCKPGVAGPKCGQCPDGRALGPAGCEADASAPATCAEMRCEFGARCVEESGSAHCVCPMLTCPEANATKVCGSDGVTYGNECQLKTIACRQGLQISIQSLGPCQEAVAPSTHPTSASVTVTTPGLLLSQALPAPPGALPLAPSSTAHSQTTPPPSSRPRTTASVPRTTVWPVLTVPPTAPSPAPSLVASAFGESGSTDGSSDEELSGDQEASGGGSGGLEPLEGSSVATPGPPVERASCYNSALGCCSDGKTPSLDAEGSNCPATKVFQGVLELEGVEGQELFYTPEMADPKSELFGETARSIESTLDDLFRNSDVKKDFRSVRLRDLGPGKSVRAIVDVHFDPTTAFRAPDVARALLRQIQVSRRRSLGVRRPLQEHVRFMDFDWFPAFITGATSGAIAAGATARATTASRLPSSAVTPRAPHPSHTSQPVAKTTAAPTTRRPPTTAPSRVPGRRPPAPQQPPKPCDSQPCFHGGTCQDWALGGGFTCSCPAGRGGAVCEKVLGAPVPAFEGRSFLAFPTLRAYHTLRLALEFRALEPQGLLLYNGNARGKDFLALALLDGRVQLRFDTGSGPAVLTSAVPVEPGQWHRLELSRHWRRGTLSVDGETPVLGESPSGTDGLNLDTDLFVGGVPEDQAAVALERTFVGAGLRGCIRLLDVNNQRLELGIGPGAATRGSGVGECGDHPCLPNPCHGGAPCQNLEAGRFHCQCPPGRVGPTCADEKSPCQPNPCHGAAPCRVLPEGGAQCECPLGREGTFCQTASGQDGSGPFLADFNGFSHLELRGLHTFARDLGEKMALEVVFLARGPSGLLLYNGQKTDGKGDFVSLALRDRRLEFRYDLGKGAAVIRSREPVTLGAWTRVSLERNGRKGALRVGDGPRVLGESPKSRKVPHTVLNLKEPLYVGGAPDFSKLARAAAVSSGFDGAIQLVSLGGRQLLTPEHVLRQVDVTSFAGHPCTRASGHPCLNGASCVPREAAYVCLCPGGFSGPHCEKGLVEKSAGDVDTLAFDGRTFVEYLNAVTESELANEIPVPETLDSGALHSEKALQSNHFELSLRTEATQGLVLWSGKATERADYVALAIVDGHLQLSYNLGSQPVVLRSTVPVNTNRWLRVVAHREQREGSLQVGNEAPVTGSSPLGATQLDTDGALWLGGLPELPVGPALPKAYGTGFVGCLRDVVVGRHPLHLLEDAVTKPELRPCPTP

SEQ ID NO: 433 - DNA, 2307 bp, Homo sapiens
agtcccgtccccggcgcggcccgcgcgctcctccgccgcctctcgcctgcgccatggccggccggtcccacccgggcccgctgcggccgctgctgccgctccttgtggtggccgcgtgcgtcctgcccggagccggcgggacatgcccggagcgcgcgctggagcggcgcgaggaggaggcgaacgtggtgctcaccgggacggtggaggagatcctcaacgtggacccggtgcagcacacgtactcctgcaaggttcgggtctggcggtacttgaagggcaaagacctggtggcccgggagagcctgctggacggcggcaacaaggtggtgatcagcggctttggagaccccctcatctgtgacaaccaggtgtccactggggacaccaggatcttctttgtgaaccctgcacccccatacctgtggccagcccacaagaacgagctgatgctcaactccagcctcatgcggatcaccctgcggaacctggaggaggtggagttctgtgtggaagataaacccgggacccacttcactccagtgcctccgacgcctcctgatgcgtgccggggaatgctgtgcggcttcggcgccgtgtgcgagcccaacgcggaggggccgggccgggcgtcctgcgtctgcaagaagagcccgtgccccagcgtggtggcgcctgtgtgtgggtcggacgcctccacctacagcaacgaatgcgagctgcagcgggcgcagtgcagccagcagcgccgcatccgcctgctcagccgcgggccgtgcggctcgcgggacccctgctccaacgtgacctgcagcttcggcagcacctgtgcgcgctcggccgacgggctgacggcctcgtgcctgtgccccgcgacctgccgtggcgcccccgaggggaccgtctgcggcagcgacggcgccgactaccccggcgagtgccagctcctgcgccgcgcctgcgcccgccaggagaatgtcttcaagaagttcgacggcccttgtgacccctgtcagggcgccctccctgacccgagccgcagctgccgtgtgaacccgcgcacgcggcgccctgagatgctcctacggcccgagagctgccctgcccggcaggcgccagtgtgtggggacgacggagtcacctacgaaaacgactgtgtcatgggccgatcgggggccgcccggggtctcctcctgcagaaagtgcgctccggccagtgccagggtcgagaccagtgcccggagccctgccggttcaatgccgtgtgcctgtcccgccgtggccgtccccgctgctcctgcgaccgcgtcacctgtgacggggcctacaggcccgtgtgtgcccaggacgggcgcacgtatgacagtgattgctggcggcagcaggctgagtgccggcagcagcgtgccatccccagcaagcaccagggcccgtgtgaccaggccccgtccccatgcctcggggtgcagtgtgcatttggggcgacgtgtgctgtgaagaacgggcaggcagcgtgtgaatgcctgcaggcgtgctcgagcctctacgatcctgtgtgcggcagcgacggcgtcacatacggcagcgcgtgcgagctggaggccacggcctgtaccctcgggcgggagatccaggtggcgcgcaaaggaccctgtgaccgctgcgggcagtgccgctttggagccctgtgcgaggccgagaccgggcgctgcgtgtgcccctctgaatgcgtggctttggcccagcccgtgtgtggctccgacgggcacacgtaccccagcgagtgcatgctgcacgtgcacgcctgcacacaccagatcagcctgcacgtggcctcagctggaccctgtgagacctgtggagatgccgtgtgtgcttttggggctgtgtgctccgcagggcagtgtgtgtgtccccggtgtgagcaccccccgcccggccccgtgtgtggcagcgacggtgtcacctacggcagtgcctgcgagctacgggaagccgcctgcctccagcagacacagatcgaggaggcccgggcagggccgtgcgagcaggccgagtgcggttccggaggctctggctctggggaggacggtgactgtgagcaggagctgtgccggcagcgcggtggcatctgggacgaggactcggaggacgggccgtgtgtctgtgacttcagctgccagagtgtcccaggcagcccggtgtgcggctcagatggggtcacctacagcaccgagtgtgagctgaagaaggccaggtgtgagtcacagcgagggctctacgtagcggcccagggagcctgccgag

SEQ ID NO: 434 - protein, 751 aa, Homo sapiens
MAGRSHPGPLRPLLPLLVVAACVLPGAGGTCPERALERREEEANVVLTGTVEEILNVDPVQHTYSCKVRVWRYLKGKDLVARESLLDGGNKVVISGFGDPLICDNQVSTGDTRIFFVNPAPPYLWPAHKNELMLNSSLMRITLRNLEEVEFCVEDKPGTHFTPVPPTPPDACRGMLCGFGAVCEPNAEGPGRASCVCKKSPCPSVVAPVCGSDASTYSNECELQRAQCSQQRRIRLLSRGPCGSRDPCSNVTCSFGSTCARSADGLTASCLCPATCRGAPEGTVCGSDGADYPGECQLLRRACARQENVFKKFDGPCDPCQGALPDPSRSCRVNPRTRRPEMLLRPESCPARQAPVCGDDGVTYENDCVMGRSGAARGLLLQKVRSGQCQGRDQCPEPCRFNAVCLSRRGRPRCSCDRVTCDGAYRPVCAQDGRTYDSDCWRQQAECRQQRAIPSKHQGPCDQAPSPCLGVQCAFGATCAVKNGQAACECLQACSSLYDPVCGSDGVTYGSACELEATACTLGREIQVARKGPCDRCGQCRFGALCEAETGRCVCPSECVALAQPVCGSDGHTYPSECMLHVHACTHQISLHVASAGPCETCGDAVCAFGAVCSAGQCVCPRCEHPPPGPVCGSDGVTYGSACELREAACLQQTQIEEARAGPCEQAECGSGGSGSGEDGDCEQELCRQRGGIWDEDSEDGPCVCDFSCQSVPGSPVCGSDGVTYSTECELKKARCESQRGLYVAAQGACR

SEQ ID NO: 435 - DNA, 102 bp, Homo sapiens
taaaaggcttctccccagatgccagagacctgtctgctaaagaaaccaagatgctgatggctgctggagacaaagatggggacggcaaaattggggttgacg

SEQ ID NO: 436 - DNA, 125 bp, Homo sapiens
ctacatctacatccaccactgggacaagccatcttgtaaaatgtgcggagaaggagaaaactttctgtgtgaatggaggggagtgcttcatggtgaaagacctttcaaacccctcgagatacttg

SEQ ID NO: 437 - DNA, 227 bp, Homo sapiens
taaaaggcttctccccagatgccagagacctgtctgctaaagaaaccaagatgctgatggctgctggagacaaagatggggacggcaaaattggggttgacgctacatctacatccaccactgggacaagccatcttgtaaaatgtgcggagaaggagaaaactttctgtgtgaatggaggggagtgcttcatggtgaaagacctttcaaacccctcgagatacttg

SEQ ID NO: 438 - protein, 75 aa, Homo sapiens
KGFSPDARDLSAKETKMLMAAGDKDGDGKIGVDATSTSTTGTSHLVKCAEKEKTFCVNGGECFMVKDLSNPSRYL

SEQ ID NO: 439 - DNA, 69 bp, Homo sapiens
acttcccgacaggacttcccaccagcccagcctttcagtgcaggctccagccctccacccccacccgag

SEQ ID NO: 440 - DNA, 68 bp, Homo sapiens
ttgcaggatgtcgatgacagacttgctgaacgctgaggacatcaagaaggcggtgggagcctttagcg

SEQ ID NO: 441 - DNA, 133 bp, Homo sapiens
ctaccgactccttcgaccacaaaaagttcttccaaatggtcggcctgaagaaaaagagtgcggatgatgtgaagaaggtgtttcacatgctggacaaggacaaaagtggcttcatcgaggaggatgagctggg

SEQ ID NO: 442 - DNA, 110 bp, Homo sapiens
attcatcctaaaaggcttctccccagatgccagagacctgtctgctaaagaaaccaagatgctgatggctgctggagacaaagatggggacggcaaaattggggttgacg

SEQ ID NO: 443 - DNA, 216 bp, Homo sapiens
aattctccactctggtggctgaaagctaagaagcactgactgcccctggtcttccacctctctgccctgaacacccaatctcggcccctctcgccaccctcctgcatttctgttcagttcgtttatgttattttttactcccccatcccctgtggccctctaatgacaccattcttctggaaaatgctggagaagcaataaaggttgtaccagtca

SEQ ID NO: 444 - DNA, 596 bp, Artificial Sequence
  Full mRNA polynucleotide sequence of PVALB
acttcccgacaggacttcccaccagcccagcctttcagtgcaggctccagccctccacccccacccgagttgcaggatgtcgatgacagacttgctgaacgctgaggacatcaagaaggcggtgggagcctttagcgctaccgactccttcgaccacaaaaagttcttccaaatggtcggcctgaagaaaaagagtgcggatgatgtgaagaaggtgtttcacatgctggacaaggacaaaagtggcttcatcgaggaggatgagctgggattcatcctaaaaggcttctccccagatgccagagacctgtctgctaaagaaaccaagatgctgatggctgctggagacaaagatggggacggcaaaattggggttgacgaattctccactctggtggctgaaagctaagaagcactgactgcccctggtcttccacctctctgccctgaacacccaatctcggcccctctcgccaccctcctgcatttctgttcagttcgtttatgttattttttactcccccatcccctgtggccctctaatgacaccattcttctggaaaatgctggagaagcaataaaggttgtaccagtca

SEQ ID NO: 445 - protein, 20 aa, Homo sapiens
MSMTDLLNAEDIKKAVGAFS

SEQ ID NO: 446 - protein, 43 aa, Homo sapiens
TDSFDHKKFFQMVGLKKKSADDVKKVFHMLDKDKSGFIEEDEL

SEQ ID NO: 447 - protein, 36 aa, Homo sapiens
FILKGFSPDARDLSAKETKMLMAAGDKDGDGKIGVD

SEQ ID NO: 448 - protein, 8 aa, Homo sapiens
FSTLVAES

SEQ ID NO: 449 - protein, 110 aa, Homo sapiens
MSMTDLLNAEDIKKAVGAFSATDSFDHKKFFQMVGLKKKSADDVKKVFHMLDKDKSGFIEEDELGFILKGFSPDARDLSAKETKMLMAAGDKDGDGKIGVDEFSTLVAES

SEQ ID NO: 450 - DNA, 380 bp, Homo sapiens
acttcccgacaggacttcccaccagcccagcctttcagtgcaggctccagccctccacccccacccgagttgcaggatgtcgatgacagacttgctgaacgctgaggacatcaagaaggcggtgggagcctttagcgctaccgactccttcgaccacaaaaagttcttccaaatggtcggcctgaagaaaaagagtgcggatgatgtgaagaaggtgtttcacatgctggacaaggacaaaagtggcttcatcgaggaggatgagctgggattcatcctaaaaggcttctccccagatgccagagacctgtctgctaaagaaaccaagatgctgatggctgctggagacaaagatggggacggcaaaattggggttgacg

SEQ ID NO: 451 - protein, 101 aa, Homo sapiens
MSMTDLLNAEDIKKAVGAFSATDSFDHKKFFQMVGLKKKSADDVKKVFHMLDKDKSGFIEEDELGFILKGFSPDARDLSAKETKMLMAAGDKDGDGKIGVD

SEQ ID NO: 452 - DNA, 93 bp, Homo sapiens
agttggggtctcactgtgttgcccagactggtctcgaactcttggcctcaggtgatcctcttccctcagcttcccagaatgccgagatgatag

SEQ ID NO: 453 - DNA, 28 bp, Homo sapiens
ctacatctacatccaccactgggacaag

SEQ ID NO: 454 - DNA, 121 bp, Homo sapiens
agttggggtctcactgtgttgcccagactggtctcgaactcttggcctcaggtgatcctcttccctcagcttcccagaatgccgagatgatagctacatctacatccaccactgggacaag

SEQ ID NO: 455 - protein, 39 aa, Homo sapiens
LGSHCVAQTGLELLASGDPLPSASQNAEMIATSTSTTGT

SEQ ID NO: 456 - DNA, 273 bp, Homo sapiens
gcattgcggcttggttttctcacccagtgcatgtggcaggagcggtgagatcactgcctcacggcgatcctggactgacggtcacgactgcctaccctctaaccctgttctgagctgccccttgcccacacaccccaaacctgtgtgcaggatccgcctccatggagctacagcctcctgaagcctcgatcgccgtcgtgtcgattccgcgccagttgcctggctcacattcggaggctggtgtccagggtctcagcgcgggggacgactcag

SEQ ID NO: 457 - DNA, 93 bp, Homo sapiens; identical to SEQ ID NO: 452

SEQ ID NO: 458 - DNA, 93 bp, Homo sapiens
agacggggtctgactgtgttacccaggctggtcttcaactcttggcctcaagtgatcctcctgccttagcttccaagaatgctgaggttacag

SEQ ID NO: 459 - DNA, 429 bp, Homo sapiens
gcaccatgagccaggacaccgaggtggatatgaaggaggtggagctgaatgagttagagcccgagaagcagccgatgaacgcggcgtctggggcggccatgtccctggcgggagccgagaagaatggtctggtgaagatcaaggtggcggaagacgaggcggaggcggcagccgcggctaagttcacgggcctgtccaaggaggagctgctgaaggtggcaggcagccccggctgggtacgcacccgctgggcactgctgctgctcttctggctcggctggctcggcatgcttgctggtgccgtggtcataatcgtgcgagcgccgcgttgtcgcgagctaccggcgcagaagtggtggcacacgggcgccctctaccgcatcggcgaccttcaggccttccagggccacggcgcgggcaacctggcgg

SEQ ID NO: 460 - DNA, 174 bp, Homo sapiens; identical to SEQ ID NO: 104

SEQ ID NO: 461 - DNA, 92 bp, Homo sapiens
gcatccgtgtcattctggaccttactcccaactaccggggtgagaactcgtggttctccactcaggttgacactgtggccaccaaggtgaag

SEQ ID NO: 462 - DNA, 69 bp, Homo sapiens; identical to SEQ ID NO: 106

SEQ ID NO: 463 - DNA, 59 bp, Homo sapiens; identical to SEQ ID NO: 107

SEQ ID NO: 464 - DNA, 181 bp, Homo sapiens; identical to SEQ ID NO: 108

SEQ ID NO: 465 - DNA, 144 bp, Homo sapiens; identical to SEQ ID NO: 109

SEQ ID NO: 466 - DNA, 84 bp, Homo sapiens; identical to SEQ ID NO: 110

SEQ ID NO: 467 - DNA, 530 bp, Homo sapiens; identical to SEQ ID NO: 111

SEQ ID NO: 468 - DNA, 2221 bp, Artificial Sequence
  Full mRNA polynucleotide sequence of SLC3A2
gcattgcggcttggttttctcacccagtgcatgtggcaggagcggtgagatcactgcctcacggcgatcctggactgacggtcacgactgcctaccctctaaccctgttctgagctgccccttgcccacacaccccaaacctgtgtgcaggatccgcctccatggagctacagcctcctgaagcctcgatcgccgtcgtgtcgattccgcgccagttgcctggctcacattcggaggctggtgtccagggtctcagcgcgggggacgactcagagttggggtctcactgtgttgcccagactggtctcgaactcttggcctcaggtgatcctcttccctcagcttcccagaatgccgagatgatagagacggggtctgactgtgttacccaggctggtcttcaactcttggcctcaagtgatcctcctgccttagcttccaagaatgctgaggttacaggcaccatgagccaggacaccgaggtggatatgaaggaggtggagctgaatgagttagagcccgagaagcagccgatgaacgcggcgtctggggcggccatgtccctggcgggagccgagaagaatggtctggtgaagatcaaggtggcggaagacgaggcggaggcggcagccgcggctaagttcacgggcctgtccaaggaggagctgctgaaggtggcaggcagccccggctgggtacgcacccgctgggcactgctgctgctcttctggctcggctggctcggcatgcttgctggtgccgtggtcataatcgtgcgagcgccgcgttgtcgcgagctaccggcgcagaagtggtggcacacgggcgccctctaccgcatcggcgaccttcaggccttccagggccacggcgcgggcaacctggcgggtctgaaggggcgtctcgattacctgagctctctgaaggtgaagggccttgtgctgggtccaattcacaagaaccagaaggatgatgtcgctcagactgacttgctgcagatcgaccccaattttggctccaaggaagattttgacagtctcttgcaatcggctaaaaaaaagagcatccgtgtcattctggaccttactcccaactaccggggtgagaactcgtggttctccactcaggttgacactgtggccaccaaggtgaaggatgctctggagttttggctgcaagctggcgtggatgggttccaggttcgggacatagagaatctgaaggatgcatcctcattcttggctgagtggcaaaatatcaccaagggcttcagtgaagacaggctcttgattgcggggactaactcctccgaccttcagcagatcctgagcctactcgaatccaacaaagacttgctgttgactagctcatacctgtctgattctggttctactggggagcatacaaaatccctagtcacacagtatttgaatgccactggcaatcgctggtgcagctggagtttgtctcaggcaaggctcctgacttccttcttgccggctcaacttctccgactctaccagctgatgctcttcaccctgccagggacccctgttttcagctacggggatgagattggcctggatgcagctgcccttcctggacagcctatggaggctccagtcatgctgtgggatgagtccagcttccctgacatcccaggggctgtaagtgccaacatgactgtgaagggccagagtgaagaccctggctccctcctttccttgttccggcggctgagtgaccagcggagtaaggagcgctccctactgcatggggacttccacgcgttctccgctgggcctggactcttctcctatatccgccactgggaccagaatgagcgttttctggtagtgcttaactttggggatgtgggcctctcggctggactgcaggcctccgacctgcctgccagcgccagcctgccagccaaggctgacctcctgctcagcacccagccaggccgtgaggagggctcccctcttgagctggaacgcctgaaactggagcctcacgaagggctgctgctccgcttcccctacgcggcctgacttcagcctgacatggacccactacccttctcctttccttcccaggccctttggcttctgatttttctcttttttaaaaacaaacaaacaaactgttgcagattatgagtgaacccccaaatagggtgttttctgccttcaaataaaagtcacccctgcatggtgaa

SEQ ID NO: 469 - protein, 37 aa, Homo sapiens
MELQPPEASIAVVSIPRQLPGSHSEAGVQGLSAGDDS

SEQ ID NO: 470 - protein, 30 aa, Homo sapiens
LGSHCVAQTGLELLASGDPLPSASQNAEMI

SEQ ID NO: 471 - protein, 30 aa, Homo sapiens
TGSDCVTQAGLQLLASSDPPALASKNAEVT

SEQ ID NO: 472 - protein, 142 aa, Homo sapiens
TMSQDTEVDMKEVELNELEPEKQPMNAASGAAMSLAGAEKNGLVKIKVAEDEAEAAAAAKFTGLSKEELLKVAGSPGWVRTRWALLLLFWLGWLGMLAGAVVIIVRAPRCRELPAQKWWHTGALYRIGDLQAFQGHGAGNLA

SEQ ID NO: 473 - protein, 57 aa, Homo sapiens; identical to SEQ ID NO: 114

SEQ ID NO: 474 - protein, 30 aa, Homo sapiens
IRVILDLTPNYRGENSWFSTQVDTVATKVK

SEQ ID NO: 475 - protein, 23 aa, Homo sapiens
DALEFWLQAGVDGFQVRDIENLK

SEQ ID NO: 476 - protein, 19 aa, Homo sapiens
DASSFLAEWQNITKGFSED

SEQ ID NO: 477 - protein, 60 aa, Homo sapiens; identical to SEQ ID NO: 118

SEQ ID NO: 478 - protein, 48 aa, Homo sapiens; identical to SEQ ID NO: 119

SEQ ID NO: 479 - protein, 28 aa, Homo sapiens
PMEAPVMLWDESSFPDIPGAVSANMTVK

SEQ ID NO: 480 - protein, 120 aa, Homo sapiens; identical to SEQ ID NO: 121

SEQ ID NO: 481 - protein, 630 aa, Homo sapiens
MELQPPEASIAVVSIPRQLPGSHSEAGVQGLSAGDDSELGSHCVAQTGLELLASGDPLPSASQNAEMIETGSDCVTQAGLQLLASSDPPALASKNAEVTGTMSQDTEVDMKEVELNELEPEKQPMNAASGAAMSLAGAEKNGLVKIKVAEDEAEAAAAAKFTGLSKEELLKVAGSPGWVRTRWALLLLFWLGWLGMLAGAVVIIVRAPRCRELPAQKWWHTGALYRIGDLQAFQGHGAGNLAGLKGRLDYLSSLKVKGLVLGPIHKNQKDDVAQTDLLQIDPNFGSKEDFDSLLQSAKKKSIRVILDLTPNYRGENSWFSTQVDTVATKVKDALEFWLQAGVDGFQVRDIENLKDASSFLAEWQNITKGFSEDRLLIAGTNSSDLQQILSLLESNKDLLLTSSYLSDSGSTGEHTKSLVTQYLNATGNRWCSWSLSQARLLTSFLPAQLLRLYQLMLFTLPGTPVFSYGDEIGLDAAALPGQPMEAPVMLWDESSFPDIPGAVSANMTVKGQSEDPGSLLSLFRRLSDQRSKERSLLHGDFHAFSAGPGLFSYIRHWDQNERFLVVLNFGDVGLSAGLQASDLPASASLPAKADLLLSTQPGREEGSPLELERLKLEPHEGLLLRFPYAA

SEQ ID NO: 482 - DNA, 366 bp, Homo sapiens
gcattgcggcttggttttctcacccagtgcatgtggcaggagcggtgagatcactgcctcacggcgatcctggactgacggtcacgactgcctaccctctaaccctgttctgagctgccccttgcccacacaccccaaacctgtgtgcaggatccgcctccatggagctacagcctcctgaagcctcgatcgccgtcgtgtcgattccgcgccagttgcctggctcacattcggaggctggtgtccagggtctcagcgcgggggacgactcagagttggggtctcactgtgttgcccagactggtctcgaactcttggcctcaggtgatcctcttccctcagcttcccagaatgccgagatgatag

SEQ ID NO: 483 - protein, 68 aa, Homo sapiens
MELQPPEASIAVVSIPRQLPGSHSEAGVQGLSAGDDSELGSHCVAQTGLELLASGDPLPSASQNAEMI

SEQ ID NO: 484 - DNA, 54 bp, Homo sapiens
ttgagcctgttgatgcccgccctgctgccgaccgaggactgaccactcgaccag

SEQ ID NO: 485 - DNA, 87 bp, Homo sapiens; identical to SEQ ID NO: 329

SEQ ID NO: 486 - DNA, 141 bp, Homo sapiens
ttgagcctgttgatgcccgccctgctgccgaccgaggactgaccactcgaccagctacatctacatccaccactgggacaagccatcttgtaaaatgtgcggagaaggagaaaactttctgtgtgaatggaggggagtgct

SEQ ID NO: 487 - protein, 46 aa, Homo sapiens
EPVDARPAADRGLTTRPATSTSTTGTSHLVKCAEKEKTFCVNGGEC

SEQ ID NO: 488 - DNA, 207 bp, Homo sapiens
gtcagtttcctcggcagcggtaggcgagagcacgcggaggagcgtgcgcgggggccccgggagacggcggcggtggcggcgcgggcagagcaaggacgcggcggatcccactcgcacagcagcgcactcggtgccccgcgcagggtcgcgatgctgcccggtttggcactgctcctgctggccgcctggacggctcgggcgctggag

SEQ ID NO: 489 - DNA, 130 bp, Homo sapiens
gtctaccctgaactgcagatcaccaatgtggtagaagccaaccaaccagtgaccatccagaactggtgcaagcggggccgcaagcagtgcaagacccatccccactttgtgattccctaccgctgcttag

SEQ ID NO: 490 - DNA, 113 bp, Homo sapiens
ttggtgagtttgtaagtgatgcccttctcgttcctgacaagtgcaaattcttacaccaggagaggatggatgtttgcgaaactcatcttcactggcacaccgtcgccaaagag

SEQ ID NO: 491 - DNA, 194 bp, Homo sapiens
acatgcagtgagaagagtaccaacttgcatgactacggcatgttgctgccctgcggaattgacaagttccgaggggtagagtttgtgtgttgcccactggctgaagaaagtgacaatgtggattctgctgatgcggaggaggatgactcggatgtctggtggggcggagcagacacagactatgcagatgggag

SEQ ID NO: 492 - DNA, 203 bp, Homo sapiens
tgaagacaaagtagtagaagtagcagaggaggaagaagtggctgaggtggaagaagaagaagccgatgatgacgaggacgatgaggatggtgatgaggtagaggaagaggctgaggaaccctacgaagaagccacagagagaaccaccagcattgccaccaccaccaccaccaccacagagtctgtggaagaggtggttcgag

SEQ ID NO: 493 - DNA, 168 bp, Homo sapiens
aggtgtgctctgaacaagccgagacggggccgtgccgagcaatgatctcccgctggtactttgatgtgactgaagggaagtgtgccccattcttttacggcggatgtggcggcaaccggaacaactttgacacagaagagtactgcatggccgtgtgtggcagcgcca

SEQ ID NO: 494 - DNA, 57 bp, Homo sapiens
tgtcccaaagtttactcaagactacccaggaacctcttgcccgagatcctgttaaac

SEQ ID NO: 495 - DNA, 134 bp, Homo sapiens
ttcctacaacagcagccagtacccctgatgccgttgacaagtatctcgagacacctggggatgagaatgaacatgcccatttccagaaagccaaagagaggcttgaggccaagcaccgagagagaatgtcccag

SEQ ID NO: 496 - DNA, 75 bp, Homo sapiens
gtcatgagagaatgggaagaggcagaacgtcaagcaaagaacttgcctaaagctgataagaaggcagttatccag

SEQ ID NO: 497 - DNA, 159 bp, Homo sapiens
catttccaggagaaagtggaatctttggaacaggaagcagccaacgagagacagcagctggtggagacacacatggccagagtggaagccatgctcaatgaccgccgccgcctggccctggagaactacatcaccgctctgcaggctgttcctcctcgg

SEQ ID NO: 498 - DNA, 129 bp, Homo sapiens
cctcgtcacgtgttcaatatgctaaagaagtatgtccgcgcagaacagaaggacagacagcacaccctaaagcatttcgagcatgtgcgcatggtggatcccaagaaagccgctcagatccggtcccag

SEQ ID NO: 499 - DNA, 100 bp, Homo sapiens
gttatgacacacctccgtgtgatttatgagcgcatgaatcagtctctctccctgctctacaacgtgcctgcagtggccgaggagattcaggatgaagttg

SEQ ID NO: 500 - DNA, 222 bp, Homo sapiens
atgagctgcttcagaaagagcaaaactattcagatgacgtcttggccaacatgattagtgaaccaaggatcagttacggaaacgatgctctcatgccatctttgaccgaaacgaaaaccaccgtggagctccttcccgtgaatggagagttcagcctggacgatctccagccgtggcattcttttggggctgactctgtgccagccaacacagaaaacgaag

SEQ ID NO: 501 - DNA, 54 bp, Homo sapiens; identical to SEQ ID NO: 484

SEQ ID NO: 502 - DNA, 101 bp, Homo sapiens
gttctgggttgacaaatatcaagacggaggagatctctgaagtgaagatggatgcagaattccgacatgactcaggatatgaagttcatcatcaaaaattg

SEQ ID NO: 503 - DNA, 147 bp, Homo sapiens
gtgttctttgcagaagatgtgggttcaaacaaaggtgcaatcattggactcatggtgggcggtgttgtcatagcgacagtgatcgtcatcaccttggtgatgctgaagaagaaacagtacacatccattcatcatggtgtggtggag

SEQ ID NO: 504 - DNA, 1222 bp, Homo sapiens
gttgacgccgctgtcaccccagaggagcgccacctgtccaagatgcagcagaacggctacgaaaatccaacctacaagttctttgagcagatgcagaactagacccccgccacagcagcctctgaagttggacagcaaaaccattgcttcactacccatcggtgtccatttatagaataatgtgggaagaaacaaacccgttttatgatttactcattatcgccttttgacagctgtgctgtaacacaagtagatgcctgaacttgaattaatccacacatcagtaatgtattctatctctctttacattttggtctctatactacattattaatgggttttgtgtactgtaaagaatttagctgtatcaaactagtgcatgaatagattctctcctgattatttatcacatagccccttagccagttgtatattattcttgtggtttgtgacccaattaagtcctactttacatatgctttaagaatcgatgggggatgcttcatgtgaacgtgggagttcagctgcttctcttgcctaagtattcctttcctgatcactatgcattttaaagttaaacatttttaagtatttcagatgctttagagagattttttttccatgactgcattttactgtacagattgctgcttctgctatatttgtgatataggaattaagaggatacacacgtttgtttcttcgtgcctgttttatgtgcacacattaggcattgagacttcaagcttttctttttttgtccacgtatctttgggtctttgataaagaaaagaatccctgttcattgtaagcacttttacggggcgggtggggaggggtgctctgctggtcttcaattaccaagaattctccaaaacaattttctgcaggatgattgtacagaatcattgcttatgacatgatcgctttctacactgtattacataaataaattaaataaaataaccccgggcaagacttttctttgaaggatgactacagacattaaataatcgaagtaattttgggtggggagaagaggcagattcaattttctttaaccagtctgaagtttcatttatgatacaaaagaagatgaaaatggaagtggcaatataaggggatgaggaaggcatgcctggacaaacccttcttttaagatgtgtcttcaatttgtataaaatggtgttttcatgtaaataaatacattcttggaggagca

SEQ ID NO: 505 - DNA, 3415 bp, Artificial Sequence
  Full mRNA polynucleotide sequence of APP
gtcagtttcctcggcagcggtaggcgagagcacgcggaggagcgtgcgcgggggccccgggagacggcggcggtggcggcgcgggcagagcaaggacgcggcggatcccactcgcacagcagcgcactcggtgccccgcgcagggtcgcgatgctgcccggtttggcactgctcctgctggccgcctggacggctcgggcgctggaggtctaccctgaactgcagatcaccaatgtggtagaagccaaccaaccagtgaccatccagaactggtgcaagcggggccgcaagcagtgcaagacccatccccactttgtgattccctaccgctgcttagttggtgagtttgtaagtgatgcccttctcgttcctgacaagtgcaaattcttacaccaggagaggatggatgtttgcgaaactcatcttcactggcacaccgtcgccaaagagacatgcagtgagaagagtaccaacttgcatgactacggcatgttgctgccctgcggaattgacaagttccgaggggtagagtttgtgtgttgcccactggctgaagaaagtgacaatgtggattctgctgatgcggaggaggatgactcggatgtctggtggggcggagcagacacagactatgcagatgggagtgaagacaaagtagtagaagtagcagaggaggaagaagtggctgaggtggaagaagaagaagccgatgatgacgaggacgatgaggatggtgatgaggtagaggaagaggctgaggaaccctacgaagaagccacagagagaaccaccagcattgccaccaccaccaccaccaccacagagtctgtggaagaggtggttcgagaggtgtgctctgaacaagccgagacggggccgtgccgagcaatgatctcccgctggtactttgatgtgactgaagggaagtgtgccccattcttttacggcggatgtggcggcaaccggaacaactttgacacagaagagtactgcatggccgtgtgtggcagcgccatgtcccaaagtttactcaagactacccaggaacctcttgcccgagatcctgttaaacttcctacaacagcagccagtacccctgatgccgttgacaagtatctcgagacacctggggatgagaatgaacatgcccatttccagaaagccaaagagaggcttgaggccaagcaccgagagagaatgtcccaggtcatgagagaatgggaagaggcagaacgtcaagcaaagaacttgcctaaagctgataagaaggcagttatccagcatttccaggagaaagtggaatctttggaacaggaagcagccaacgagagacagcagctggtggagacacacatggccagagtggaagccatgctcaatgaccgccgccgcctggccctggagaactacatcaccgctctgcaggctgttcctcctcggcctcgtcacgtgttcaatatgctaaagaagtatgtccgcgcagaacagaaggacagacagcacaccctaaagcatttcgagcatgtgcgcatggtggatcccaagaaagccgctcagatccggtcccaggttatgacacacctccgtgtgatttatgagcgcatgaatcagtctctctccctgctctacaacgtgcctgcagtggccgaggagattcaggatgaagttgatgagctgcttcagaaagagcaaaactattcagatgacgtcttggccaacatgattagtgaaccaaggatcagttacggaaacgatgctctcatgccatctttgaccgaaacgaaaaccaccgtggagctccttcccgtgaatggagagttcagcctggacgatctccagccgtggcattcttttggggctgactctgtgccagccaacacagaaaacgaagttgagcctgttgatgcccgccctgctgccgaccgaggactgaccactcgaccaggttctgggttgacaaatatcaagacggaggagatctctgaagtgaagatggatgcagaattccgacatgactcaggatatgaagttcatcatcaaaaattggtgttctttgcagaagatgtgggttcaaacaaaggtgcaatcattggactcatggtgggcggtgttgtcatagcgacagtgatcgtcatcaccttggtgatgctgaagaagaaacagtacacatccattcatcatggtgtggtggaggttgacgccgctgtcaccccagaggagcgccacctgtccaagatgcagcagaacggctacgaaaatccaacctacaagttctttgagcagatgcagaactagacccccgccacagcagcctctgaagttggacagcaaaaccattgcttcactacccatcggtgtccatttatagaataatgtgggaagaaacaaacccgttttatgatttactcattatcgccttttgacagctgtgctgtaacacaagtagatgcctgaacttgaattaatccacacatcagtaatgtattctatctctctttacattttggtctctatactacattattaatgggttttgtgtactgtaaagaatttagctgtatcaaactagtgcatgaatagattctctcctgattatttatcacatagccccttagccagttgtatattattcttgtggtttgtgacccaattaagtcctactttacatatgctttaagaatcgatgggggatgcttcatgtgaacgtgggagttcagctgcttctcttgcctaagtattcctttcctgatcactatgcattttaaagttaaacatttttaagtatttcagatgctttagagagattttttttccatgactgcattttactgtacagattgctgcttctgctatatttgtgatataggaattaagaggatacacacgtttgtttcttcgtgcctgttttatgtgcacacattaggcattgagacttcaagcttttctttttttgtccacgtatctttgggtctttgataaagaaaagaatccctgttcattgtaagcacttttacggggcgggtggggaggggtgctctgctggtcttcaattaccaagaattctccaaaacaattttctgcaggatgattgtacagaatcattgcttatgacatgatcgctttctacactgtattacataaataaattaaataaaataaccccgggcaagacttttctttgaaggatgactacagacattaaataatcgaagtaattttgggtggggagaagaggcagattcaattttctttaaccagtctgaagtttcatttatgatacaaaagaagatgaaaatggaagtggcaatataaggggatgaggaaggcatgcctggacaaacccttcttttaagatgtgtcttcaatttgtataaaatggtgttttcatgtaaataaatacattcttggaggagca

SEQ ID NO: 506 - protein, 19 aa, Homo sapiens
MLPGLALLLLAAWTARALE

SEQ ID NO: 507 - protein, 43 aa, Homo sapiens
VYPELQITNVVEANQPVTIQNWCKRGRKQCKTHPHFVIPYRCL

SEQ ID NO: 508 - protein, 37 aa, Homo sapiens
GEFVSDALLVPDKCKFLHQERMDVCETHLHWHTVAKE

SEQ ID NO: 509 - protein, 64 aa, Homo sapiens
TCSEKSTNLHDYGMLLPCGIDKFRGVEFVCCPLAEESDNVDSADAEEDDSDVWWGGADTDYADG

SEQ ID NO: 510 - protein, 67 aa, Homo sapiens
EDKVVEVAEEEEVAEVEEEEADDDEDDEDGDEVEEEAEEPYEEATERTTSIATTTTTTTESVEEVVR

SEQ ID NO: 511 - protein, 55 aa, Homo sapiens
VCSEQAETGPCRAMISRWYFDVTEGKCAPFFYGGCGGNRNNFDTEEYCMAVCGSA

SEQ ID NO: 512 - protein, 18 aa, Homo sapiens
SQSLLKTTQEPLARDPVK

SEQ ID NO: 513 - protein, 44 aa, Homo sapiens
PTTAASTPDAVDKYLETPGDENEHAHFQKAKERLEAKHRERMSQ

SEQ ID NO: 514 - protein, 25 aa, Homo sapiens
VMREWEEAERQAKNLPKADKKAVIQ

SEQ ID NO: 515 - protein, 53 aa, Homo sapiens
HFQEKVESLEQEAANERQQLVETHMARVEAMLNDRRRLALENYITALQAVPPR

SEQ ID NO: 516 - protein, 43 aa, Homo sapiens
PRHVFNMLKKYVRAEQKDRQHTLKHFEHVRMVDPKKAAQIRSQ

SEQ ID NO: 517 - protein, 33 aa, Homo sapiens
VMTHLRVIYERMNQSLSLLYNVPAVAEEIQDEV

SEQ ID NO: 518 - protein, 73 aa, Homo sapiens
ELLQKEQNYSDDVLANMISEPRISYGNDALMPSLTETKTTVELLPVNGEFSLDDLQPWHSFGADSVPANTENE

SEQ ID NO: 519 - protein, 17 aa, Homo sapiens
EPVDARPAADRGLTTRP

SEQ ID NO: 520 - protein, 33 aa, Homo sapiens
SGLTNIKTEEISEVKMDAEFRHDSGYEVHHQKL

SEQ ID NO: 521 - protein, 49 aa, Homo sapiens
VFFAEDVGSNKGAIIGLMVGGVVIATVIVITLVMLKKKQYTSIHHGVVE

SEQ ID NO: 522 - protein, 33 aa, Homo sapiens
VDAAVTPEERHLSKMQQNGYENPTYKFFEQMQN

SEQ ID NO: 523 - protein, 714 aa, Homo sapiens
MLPGLALLLLAAWTARALEVYPELQITNVVEANQPVTIQNWCKRGRKQCKTHPHFVIPYRCLVGEFVSDALLVPDKCKFLHQERMDVCETHLHWHTVAKETCSEKSTNLHDYGMLLPCGIDKFRGVEFVCCPLAEESDNVDSADAEEDDSDVWWGGADTDYADGSEDKVVEVAEEEEVAEVEEEEADDDEDDEDGDEVEEEAEEPYEEATERTTSIATTTTTTTESVEEVVREVCSEQAETGPCRAMISRWYFDVTEGKCAPFFYGGCGGNRNNFDTEEYCMAVCGSAMSQSLLKTTQEPLARDPVKLPTTAASTPDAVDKYLETPGDENEHAHFQKAKERLEAKHRERMSQVMREWEEAERQAKNLPKADKKAVIQHFQEKVESLEQEAANERQQLVETHMARVEAMLNDRRRLALENYITALQAVPPRPRHVFNMLKKYVRAEQKDRQHTLKHFEHVRMVDPKKAAQIRSQVMTHLRVIYERMNQSLSLLYNVPAVAEEIQDEVDELLQKEQNYSDDVLANMISEPRISYGNDALMPSLTETKTTVELLPVNGEFSLDDLQPWHSFGADSVPANTENEVEPVDARPAADRGLTTRPGSGLTNIKTEEISEVKMDAEFRHDSGYEVHHQKLVFFAEDVGSNKGAIIGLMVGGVVIATVIVITLVMLKKKQYTSIHHGVVEVDAAVTPEERHLSKMQQNGYENPTYKFFEQMQN

SEQ ID NO: 524 - DNA, 1945 bp, Homo sapiens
gtcagtttcctcggcagcggtaggcgagagcacgcggaggagcgtgcgcgggggccccgggagacggcggcggtggcggcgcgggcagagcaaggacgcggcggatcccactcgcacagcagcgcactcggtgccccgcgcagggtcgcgatgctgcccggtttggcactgctcctgctggccgcctggacggctcgggcgctggaggtctaccctgaactgcagatcaccaatgtggtagaagccaaccaaccagtgaccatccagaactggtgcaagcggggccgcaagcagtgcaagacccatccccactttgtgattccctaccgctgcttagttggtgagtttgtaagtgatgcccttctcgttcctgacaagtgcaaattcttacaccaggagaggatggatgtttgcgaaactcatcttcactggcacaccgtcgccaaagagacatgcagtgagaagagtaccaacttgcatgactacggcatgttgctgccctgcggaattgacaagttccgaggggtagagtttgtgtgttgcccactggctgaagaaagtgacaatgtggattctgctgatgcggaggaggatgactcggatgtctggtggggcggagcagacacagactatgcagatgggagtgaagacaaagtagtagaagtagcagaggaggaagaagtggctgaggtggaagaagaagaagccgatgatgacgaggacgatgaggatggtgatgaggtagaggaagaggctgaggaaccctacgaagaagccacagagagaaccaccagcattgccaccaccaccaccaccaccacagagtctgtggaagaggtggttcgagaggtgtgctctgaacaagccgagacggggccgtgccgagcaatgatctcccgctggtactttgatgtgactgaagggaagtgtgccccattcttttacggcggatgtggcggcaaccggaacaactttgacacagaagagtactgcatggccgtgtgtggcagcgccatgtcccaaagtttactcaagactacccaggaacctcttgcccgagatcctgttaaacttcctacaacagcagccagtacccctgatgccgttgacaagtatctcgagacacctggggatgagaatgaacatgcccatttccagaaagccaaagagaggcttgaggccaagcaccgagagagaatgtcccaggtcatgagagaatgggaagaggcagaacgtcaagcaaagaacttgcctaaagctgataagaaggcagttatccagcatttccaggagaaagtggaatctttggaacaggaagcagccaacgagagacagcagctggtggagacacacatggccagagtggaagccatgctcaatgaccgccgccgcctggccctggagaactacatcaccgctctgcaggctgttcctcctcggcctcgtcacgtgttcaatatgctaaagaagtatgtccgcgcagaacagaaggacagacagcacaccctaaagcatttcgagcatgtgcgcatggtggatcccaagaaagccgctcagatccggtcccaggttatgacacacctccgtgtgatttatgagcgcatgaatcagtctctctccctgctctacaacgtgcctgcagtggccgaggagattcaggatgaagttgatgagctgcttcagaaagagcaaaactattcagatgacgtcttggccaacatgattagtgaaccaaggatcagttacggaaacgatgctctcatgccatctttgaccgaaacgaaaaccaccgtggagctccttcccgtgaatggagagttcagcctggacgatctccagccgtggcattcttttggggctgactctgtgccagccaacacagaaaacgaagttgagcctgttgatgcccgccctgctgccgaccgaggactgaccactcgaccag

SEQ ID NO: 525 - protein, 598 aa, Homo sapiens
MLPGLALLLLAAWTARALEVYPELQITNVVEANQPVTIQNWCKRGRKQCKTHPHFVIPYRCLVGEFVSDALLVPDKCKFLHQERMDVCETHLHWHTVAKETCSEKSTNLHDYGMLLPCGIDKFRGVEFVCCPLAEESDNVDSADAEEDDSDVWWGGADTDYADGSEDKVVEVAEEEEVAEVEEEEADDDEDDEDGDEVEEEAEEPYEEATERTTSIATTTTTTTESVEEVVREVCSEQAETGPCRAMISRWYFDVTEGKCAPFFYGGCGGNRNNFDTEEYCMAVCGSAMSQSLLKTTQEPLARDPVKLPTTAASTPDAVDKYLETPGDENEHAHFQKAKERLEAKHRERMSQVMREWEEAERQAKNLPKADKKAVIQHFQEKVESLEQEAANERQQLVETHMARVEAMLNDRRRLALENYITALQAVPPRPRHVFNMLKKYVRAEQKDRQHTLKHFEHVRMVDPKKAAQIRSQVMTHLRVIYERMNQSLSLLYNVPAVAEEIQDEVDELLQKEQNYSDDVLANMISEPRISYGNDALMPSLTETKTTVELLPVNGEFSLDDLQPWHSFGADSVPANTENEVEPVDARPAADRGLTTRP

SEQ ID NO: 526 - DNA, 96 bp, Homo sapiens
aagctggctgcccccttgatttggagcgagcaggcctgactccagaggttcagaagattattgctgatgttatccgaaaccctcccgtcaactcag

SEQ ID NO: 527 - DNA, 87 bp, Homo sapiens; identical to SEQ ID NO: 329

SEQ ID NO: 528 - DNA, 182 bp, Homo sapiens
aagctggctgcccccttgatttggagcgagcaggcctgactccagaggttcagaagattattgctgatgttatccgaaaccctcccgtcaactcagctacatctacatccaccactgggacaagccatcttgtaaaatgtgcggagaaggagaaaactttctgtgtgaatggaggggagtgc

SEQ ID NO: 529 - protein, 60 aa, Homo sapiens
AGCPLDLERAGLTPEVQKIIADVIRNPPVNSATSTSTTGTSHLVKCAEKEKTFCVNGGEC

SEQ ID NO: 530 - DNA, 164 bp, Homo sapiens
gtgtactgtgtgcgccggggaggcgccggcttgtactcggcagcgcgggaataaagtttgctgatttggtgtctagcctggatgcctgggttgcaggccctgcttgtggtggcgctccacagtcatccggctgaagaagacctgttggactggatcttctcggg

SEQ ID NO: 531 - DNA, 172 bp, Homo sapiens
ttttctttcagatattgttttgtatttacccatgaagacattgttttttggactctgcaaataggacatttcaaagatgagtgaaaaaaaattggaaacaactgcacagcagcggaaatgtcctgaatggatgaatgtgcagaataaaagatgtgctgtagaagaaagaaag

SEQ ID NO: 532 - DNA, 113 bp, Homo sapiens
gcatgtgttcggaagagtgtttttgaagatgacctccccttcttagaattcactggatccattgtgtatagttacgatgctagtgattgctctttcctgtcagaagatattag

SEQ ID NO: 533 - DNA, 146 bp, Homo sapiens
catgagtctatcagatggggatgtggtgggatttgacatggagtggccaccattatacaatagagggaaacttggcaaagttgcactaattcagttgtgtgtttctgagagcaaatgttacttgttccacgtttcttccatgtcag

SEQ ID NO: 534 - DNA, 149 bp, Homo sapiens
tttttccccagggattaaaaatgttgcttgaaaataaagcagttaaaaaggcaggtgtaggaattgaaggagatcagtggaaacttctacgtgactttgatatcaaattgaagaattttgtggagttgacagatgttgccaataaaaag

SEQ ID NO: 535 - DNA, 150 bp, Homo sapiens
ctgaaatgcacagagacctggagccttaacagtctggttaaacacctcttaggtaaacagctcctgaaagacaagtctatccgctgtagcaattggagtaaatttcctctcactgaggaccagaaactgtatgcagccactgatgcttat

SEQ ID NO: 536 - DNA, 70 bp, Homo sapiens
gctggttttattatttaccgaaatttagagattttggatgatactgtgcaaaggtttgctataaataaag

SEQ ID NO: 537 - DNA, 115 bp, Homo sapiens
aggaagaaatcctacttagcgacatgaacaaacagttgacttcaatctctgaggaagtgatggatctggctaagcatcttcctcatgctttcagtaaattggaaaacccacggag

SEQ ID NO: 538 - DNA, 430 bp, Homo sapiens
ggtttctatcttactaaaggatatttcagaaaatctatattcactgaggaggatgataattgggtctactaacattgagactgaactgaggcccagcaataatttaaacttattatcctttgaagattcaactactgggggagtacaacagaaacaaattagagaacatgaagttttaattcacgttgaagatgaaacatgggacccaacacttgatcatttagctaaacatgatggagaagatgtacttggaaataaagtggaacgaaaagaagatggatttgaagatggagtagaagacaacaaattgaaagagaatatggaaagagcttgtttgatgtcgttagatattacagaacatgaactccaaattttggaacagcagtctcaggaagaatatcttagtgatattgcttataaatctactgag

SEQ ID NO: 539 - DNA, 81 bp, Homo sapiens
catttatctcccaatgataatgaaaacgatacgtcctatgtaattgagagtgatgaagatttagaaatggagatgcttaag

SEQ ID NO: 540 - DNA, 81 bp, Homo sapiens; identical to SEQ ID NO: 539

SEQ ID NO: 541 - DNA, 145 bp, Homo sapiens
tctttagaaaacctcaatagtggcacggtagaaccaactcattctaaatgcttaaaaatggaaagaaatctgggtcttcctactaaagaagaagaagaagatgatgaaaatgaagctaatgaaggggaagaagatgatgataagg

SEQ ID NO: 542 - DNA, 76 bp, Homo sapiens
actttttgtggccagcacccaatgaagagcaagttacttgcctcaagatgtactttggccattccagttttaaacc

SEQ ID NO: 543 - DNA, 68 bp, Homo sapiens
agttcagtggaaagtgattcattcagtattagaagaaagaagagataatgttgctgtcatggcaactg

SEQ ID NO: 544 - DNA, 109 bp, Homo sapiens
gatatggaaagagtttgtgcttccagtatccacctgtttatgtaggcaagattggccttgttatctctccccttatttctctgatggaagaccaagtgctacagcttaa

SEQ ID NO: 545 - DNA, 69 bp, Homo sapiens
aatgtccaacatcccagcttgcttccttggatcagcacagtcagaaaatgttctaacagatattaaatt

SEQ ID NO: 546 - DNA, 83 bp, Homo sapiens
aggtaaataccggattgtatacgtaactccagaatactgttcaggtaacatgggcctgctccagcaacttgaggctgatattg

SEQ ID NO: 547 - DNA, 107 bp, Homo sapiens
gtatcacgctcattgctgtggatgaggctcactgtatttctgagtgggggcatgattttagggattcattcaggaagttgggctccctaaagacagcactgccaatg

SEQ ID NO: 548 - DNA, 185 bp, Homo sapiens
gttccaatcgttgcacttactgctactgcaagttcttcaatccgggaagacattgtacgttgcttaaatctgagaaatcctcagatcacctgtactggttttgatcgaccaaacctgtatttagaagttaggcgaaaaacagggaatatccttcaggatctgcagccatttcttgtcaaaacaag

SEQ ID NO: 549 - DNA, 175 bp, Homo sapiens
ttcccactgggaatttgaaggtccaacaatcatctactgtccttctagaaaaatgacacaacaagttacaggtgaacttaggaaactgaatctatcctgtggaacataccatgcgggcatgagttttagcacaaggaaagacattcatcataggtttgtaagagatgaaattcag

SEQ ID NO: 550 - DNA, 182 bp, Homo sapiens
tgtgtcatagctaccatagcttttggaatgggcattaataaagctgacattcgccaagtcattcattacggtgctcctaaggacatggaatcatattatcaggagattggtagagctggtcgtgatggacttcaaagttcttgtcacgtcctctgggctcctgcagacattaacttaaatag

SEQ ID NO: 551 - DNA, 102 bp, Homo sapiens
gcaccttcttactgagatacgtaatgagaagtttcgattatacaaattaaagatgatggcaaagatggaaaaatatcttcattctagcagatgtaggagaca

SEQ ID NO: 552 - DNA, 93 bp, Homo sapiens
aatcatcttgtctcattttgaggacaaacaagtacaaaaagcctccttgggaattatgggaactgaaaaatgctgtgataattgcaggtccag

SEQ ID NO: 553 - DNA, 142 bp, Homo sapiens
attggatcattgctattccatggatgactcagaggatacatcctgggactttggtccacaagcatttaagcttttgtctgctgtggacatcttaggcgaaaaatttggaattgggcttccaattttatttctccgaggatct

SEQ ID NO: 554 - DNA, 171 bp, Homo sapiens
aattctcagcgtcttgccgatcaatatcgcaggcacagtttatttggcactggcaaggatcaaacagagagttggtggaaggctttttcccgtcagctgatcactgagggattcttggtagaagtttctcggtataacaaatttatgaagatttgcgcccttacgaaaaag

SEQ ID NO: 555 - DNA, 95 bp, Homo sapiens
ggtagaaattggcttcataaagctaatacagaatctcagagcctcatccttcaagctaatgaagaattgtgtccaaagaagttgcttctgcctag

SEQ ID NO: 556 - DNA, 76 bp, Homo sapiens
ttcgaaaactgtatcttcgggcaccaaagagcattgttataatcaagtaccagttgaattaagtacagagaagaag

SEQ ID NO: 557 - DNA, 74 bp, Homo sapiens
tctaacttggagaagttatattcttataaaccatgtgataagatttcttctgggagtaacatttctaaaaaaag

SEQ ID NO: 558 - DNA, 76 bp, Homo sapiens
tatcatggtacagtcaccagaaaaagcttacagttcctcacagcctgttatttcggcacaagagcaggagactcag

SEQ ID NO: 559 - DNA, 113 bp, Homo sapiens
attgtgttatatggcaaattggtagaagctaggcagaaacatgccaataaaatggatgttcccccagctattctggcaacaaacaagatactggtggatatggccaaaatgag

SEQ ID NO: 560 - DNA, 115 bp, Homo sapiens
accaactacggttgaaaacgtaaaaaggattgatggtgtttctgaaggcaaagctgccatgttggcccctctgttggaagtcatcaaacatttctgccaaacaaatagtgttcag

SEQ ID NO: 561 - DNA, 132 bp, Homo sapiens
acagacctcttttcaagtacaaaacctcaagaagaacagaagacgagtctggtagcaaaaaataaaatatgcacactttcacagtctatggccatcacatactctttattccaagaaaagaagatgcctttg

SEQ ID NO: 562 - DNA, 163 bp, Homo sapiens
aagagcatagctgagagcaggattctgcctctcatgacaattggcatgcacttatcccaagcggtgaaagctggctgcccccttgatttggagcgagcaggcctgactccagaggttcagaagattattgctgatgttatccgaaaccctcccgtcaactcag

SEQ ID NO: 563 - DNA, 209 bp, Homo sapiens
atatgagtaaaattagcctaatcagaatgttagttcctgaaaacattgacacgtaccttatccacatggcaattgagatccttaaacatggtcctgacagcggacttcaaccttcatgtgatgtcaacaaaaggagatgttttcccggttctgaagagatctgttcaagttctaagagaagcaaggaagaagtaggcatcaatactgag

SEQ ID NO: 564 - DNA, 3144 bp, Homo sapiens
acttcatctgcagagagaaagagacgattacctgtgtggtttgccaaaggaagtgataccagcaagaaattaatggacaaaacgaaaaggggaggtctttttagttaagctggcaattaccagaacaattatgtttcttgctgtattataagaggatagctatattttatttctgaagagtaaggagtagtattttggcttaaaaatcattctaattacaaagttcactgtttattgaagaactggcatcttaaatcagccttccgcaattcatgtagtttctgggtcttctgggagcctacgtgagtacatcacctaacagaatattaaattagacttcctgtaagattgctttaagaaactgttactgtcctgttttctaatctctttattaaaacagtgtatttggaaaatgttatgtgctctgatttgatatagataacagattagtagttacatggtaattatgtgatataaaatattcatatattatcaaaattctgttttgtaaatgtaagaaagcatagttattttacaaattgtttttactgtcttttgaagaagttcttaaatacgttgttaaatggtattagttgaccagggcagtgaaaatgaaaccgcattttgggtgccattaaatagggaaaaaacatgtaaaaaatgtaaaatggagaccaattgcactaggcaagtgtatattttgtattttatatacaatttctattatttttcaagtaataaaacaatgtttttcatactgaatattatatatatattttttagctttcatttacttaattattttaagtacctttatttttccaggatgtcagaatttgattctaatctctcttatgtagcacatgtgacttaatttaaaacctatactgtgacacagagttgggtaaacgatgattatttaactttaagcagttcaccatccatttcaaagcctttgattggcttttttgtaaataaaaataacttgttaagaaacaaatatatctgtcatagaagaactagaaaatccagggaagtgagaaaaatgaaaataaaaatcattcatagttttactagtagctaatcacagtcaacctcttttgtgtatcccaccagacttttttatattcatttgtttttagttaaaatataaaagtctcgtatattcccatttttctgcattgcattaccagaaggtagtggcgcctattaaatatgtgatatgttgttgtccagccatggcttctgcatttgcatgcttttgtgtgtgcatctgcaataccctgtgaatatcctgtgtgatggagtggcaagtacgcacagacacgtctgctgcatgcctaggtacgaggctgtctccaggagaagcacttgtttgattatttgagttgccaattgaatttgctgctttttttcatggcttgccattttcactgaaaagaatgactaatgaaaaacgatgattggttattagatttggatgtttggcagacattttctcaaaattgaactaagttggcctcttcacggaaaacaactggtatttgttgtgccaatgataaaattggagatttctagcaaaatgtataattttggaaaagttgtgttcctccactggaagcttgacagctttccttaacataaagacttctctttctcttcgctttcactactactactactaattcttcttctgattcttcttcttctccttcttccttcttccttccttcctcctcctcctccttcttcttcctcttcctcttcttctttctctctttccttccttcccttcccttccccttccttccttccttccttccttcctccctccctccctccctccctccctccctcctttctttttctttctctttctttctttctttctctctctctctctctttctttctttttctttctctttttctttctttcaagcagtcctcccgcctcagtcccccaaaatagtgggattacaggtgtgagccaccatgcacagccttacataaagccttttctaatgagatggatagtaattaacaaatgtgagtttttgatattatataaagattttttctgtgtttcgaagatccgtataactcagtgaatcagtatgttctggatgactaatatgtgatgttaagaaatcatgactgaggccgggcgcggtggctcacgcctgtaatcccagcactttgggaggccgaggcgggcggatcacgagatcaggagatcgagaccaccctggccaacatggtgaaaccccgtctctactaaaaatacaaaaattagctgggtgtgttggtgcgtgcctataatcccagctactcgggaggctgaggcaggagaatcgcttgaactcaggaggcggagattgcagtgagctgagactgcgccactgcaccccagcctggcgacagagcaagactccgtctcaaaaataaaaaaagaaatcatgactgggtaaaagatctgttcagagtacaagatggaccaatggatttgatatatttgaatataacagagtatgaaaaagtttattgatatagtttcagattacacactgcaactaatctttaagaaactattacttgtccactttttggtaaaatttcagagaacaatgtccaccattatctgaacaggctattaaaatactcttctcttttccaactacgtgcctgtgcaaagtcagatttttttcatatacttcagccaaaacagcatatcaaaatggattgaatgcagaagtagatctgagaatacagccacttttgttaagccagacaatgagatttgcaaaatgtaaacaatgctgctgttctcagtttttaaaaatatgttttttaaaagtatttatgttaatgtgtacttggtttactactgctatttttaaataaaacaagaaacatttttaaatgtctgttttaatttctaaagtggtagtgatagatataacccatattaataaaagctctttggggtcctcagtgatttttttttaagagtatggaagggttctcagacctaagagattgagaaatgctgatgtaatgttttattataaaggtgtaccatgaattatgtaccttacttcatattgttggacattaaagttgctttcagtttttttgttttaaa

SEQ ID NO: 565 - DNA, 7575 bp, Artificial Sequence
  Full mRNA polynucleotide sequence of WRN
gtgtactgtgtgcgccggggaggcgccggcttgtactcggcagcgcgggaataaagtttgctgatttggtgtctagcctggatgcctgggttgcaggccctgcttgtggtggcgctccacagtcatccggctgaagaagacctgttggactggatcttctcgggttttctttcagatattgttttgtatttacccatgaagacattgttttttggactctgcaaataggacatttcaaagatgagtgaaaaaaaattggaaacaactgcacagcagcggaaatgtcctgaatggatgaatgtgcagaataaaagatgtgctgtagaagaaagaaaggcatgtgttcggaagagtgtttttgaagatgacctccccttcttagaattcactggatccattgtgtatagttacgatgctagtgattgctctttcctgtcagaagatattagcatgagtctatcagatggggatgtggtgggatttgacatggagtggccaccattatacaatagagggaaacttggcaaagttgcactaattcagttgtgtgtttctgagagcaaatgttacttgttccacgtttcttccatgtcagtttttccccagggattaaaaatgttgcttgaaaataaagcagttaaaaaggcaggtgtaggaattgaaggagatcagtggaaacttctacgtgactttgatatcaaattgaagaattttgtggagttgacagatgttgccaataaaaagctgaaatgcacagagacctggagccttaacagtctggttaaacacctcttaggtaaacagctcctgaaagacaagtctatccgctgtagcaattggagtaaatttcctctcactgaggaccagaaactgtatgcagccactgatgcttatgctggttttattatttaccgaaatttagagattttggatgatactgtgcaaaggtttgctataaataaagaggaagaaatcctacttagcgacatgaacaaacagttgacttcaatctctgaggaagtgatggatctggctaagcatcttcctcatgctttcagtaaattggaaaacccacggagggtttctatcttactaaaggatatttcagaaaatctatattcactgaggaggatgataattgggtctactaacattgagactgaactgaggcccagcaataatttaaacttattatcctttgaagattcaactactgggggagtacaacagaaacaaattagagaacatgaagttttaattcacgttgaagatgaaacatgggacccaacacttgatcatttagctaaacatgatggagaagatgtacttggaaataaagtggaacgaaaagaagatggatttgaagatggagtagaagacaacaaattgaaagagaatatggaaagagcttgtttgatgtcgttagatattacagaacatgaactccaaattttggaacagcagtctcaggaagaatatcttagtgatattgcttataaatctactgagcatttatctcccaatgataatgaaaacgatacgtcctatgtaattgagagtgatgaagatttagaaatggagatgcttaagcatttatctcccaatgataatgaaaacgatacgtcctatgtaattgagagtgatgaagatttagaaatggagatgcttaagtctttagaaaacctcaatagtggcacggtagaaccaactcattctaaatgcttaaaaatggaaagaaatctgggtcttcctactaaagaagaagaagaagatgatgaaaatgaagctaatgaaggggaagaagatgatgataaggactttttgtggccagcacccaatgaagagcaagttacttgcctcaagatgtactttggccattccagttttaaaccagttcagtggaaagtgattcattcagtattagaagaaagaagagataatgttgctgtcatggcaactggatatggaaagagtttgtgcttccagtatccacctgtttatgtaggcaagattggccttgttatctctccccttatttctctgatggaagaccaagtgctacagcttaaaatgtccaacatcccagcttgcttccttggatcagcacagtcagaaaatgttctaacagatattaaattaggtaaataccggattgtatacgtaactccagaatactgttcaggtaacatgggcctgctccagcaacttgaggctgatattggtatcacgctcattgctgtggatgaggctcactgtatttctgagtgggggcatgattttagggattcattcaggaagttgggctccctaaagacagcactgccaatggttccaatcgttgcacttactgctactgcaagttcttcaatccgggaagacattgtacgttgcttaaatctgagaaatcctcagatcacctgtactggttttgatcgaccaaacctgtatttagaagttaggcgaaaaacagggaatatccttcaggatctgcagccatttcttgtcaaaacaagttcccactgggaatttgaaggtccaacaatcatctactgtccttctagaaaaatgacacaacaagttacaggtgaacttaggaaactgaatctatcctgtggaacataccatgcgggcatgagttttagcacaaggaaagacattcatcataggtttgtaagagatgaaattcagtgtgtcatagctaccatagcttttggaatgggcattaataaagctgacattcgccaagtcattcattacggtgctcctaaggacatggaatcatattatcaggagattggtagagctggtcgtgatggacttcaaagttcttgtcacgtcctctgggctcctgcagacattaacttaaataggcaccttcttactgagatacgtaatgagaagtttcgattatacaaattaaagatgatggcaaagatggaaaaatatcttcattctagcagatgtaggagacaaatcatcttgtctcattttgaggacaaacaagtacaaaaagcctccttgggaattatgggaactgaaaaatgctgtgataattgcaggtccagattggatcattgctattccatggatgactcagaggatacatcctgggactttggtccacaagcatttaagcttttgtctgctgtggacatcttaggcgaaaaatttggaattgggcttccaattttatttctccgaggatctaattctcagcgtcttgccgatcaatatcgcaggcacagtttatttggcactggcaaggatcaaacagagagttggtggaaggctttttcccgtcagctgatcactgagggattcttggtagaagtttctcggtataacaaatttatgaagatttgcgcccttacgaaaaagggtagaaattggcttcataaagctaatacagaatctcagagcctcatccttcaagctaatgaagaattgtgtccaaagaagttgcttctgcctagttcgaaaactgtatcttcgggcaccaaagagcattgttataatcaagtaccagttgaattaagtacagagaagaagtctaacttggagaagttatattcttataaaccatgtgataagatttcttctgggagtaacatttctaaaaaaagtatcatggtacagtcaccagaaaaagcttacagttcctcacagcctgttatttcggcacaagagcaggagactcagattgtgttatatggcaaattggtagaagctaggcagaaacatgccaataaaatggatgttcccccagctattctggcaacaaacaagatactggtggatatggccaaaatgagaccaactacggttgaaaacgtaaaaaggattgatggtgtttctgaaggcaaagctgccatgttggcccctctgttggaagtcatcaaacatttctgccaaacaaatagtgttcagacagacctcttttcaagtacaaaacctcaagaagaacagaagacgagtctggtagcaaaaaataaaatatgcacactttcacagtctatggccatcacatactctttattccaagaaaagaagatgcctttgaagagcatagctgagagcaggattctgcctctcatgacaattggcatgcacttatcccaagcggtgaaagctggctgcccccttgatttggagcgagcaggcctgactccagaggttcagaagattattgctgatgttatccgaaaccctcccgtcaactcagatatgagtaaaattagcctaatcagaatgttagttcctgaaaacattgacacgtaccttatccacatggcaattgagatccttaaacatggtcctgacagcggacttcaaccttcatgtgatgtcaacaaaaggagatgttttcccggttctgaagagatctgttcaagttctaagagaagcaaggaagaagtaggcatcaatactgagacttcatctgcagagagaaagagacgattacctgtgtggtttgccaaaggaagtgataccagcaagaaattaatggacaaaacgaaaaggggaggtctttttagttaagctggcaattaccagaacaattatgtttcttgctgtattataagaggatagctatattttatttctgaagagtaaggagtagtattttggcttaaaaatcattctaattacaaagttcactgtttattgaagaactggcatcttaaatcagccttccgcaattcatgtagtttctgggtcttctgggagcctacgtgagtacatcacctaacagaatattaaattagacttcctgtaagattgctttaagaaactgttactgtcctgttttctaatctctttattaaaacagtgtatttggaaaatgttatgtgctctgatttgatatagataacagattagtagttacatggtaattatgtgatataaaatattcatatattatcaaaattctgttttgtaaatgtaagaaagcatagttattttacaaattgtttttactgtcttttgaagaagttcttaaatacgttgttaaatggtattagttgaccagggcagtgaaaatgaaaccgcattttgggtgccattaaatagggaaaaaacatgtaaaaaatgtaaaatggagaccaattgcactaggcaagtgtatattttgtattttatatacaatttctattatttttcaagtaataaaacaatgtttttcatactgaatattatatatatattttttagctttcatttacttaattattttaagtacctttatttttccaggatgtcagaatttgattctaatctctcttatgtagcacatgtgacttaatttaaaacctatactgtgacacagagttgggtaaacgatgattatttaactttaagcagttcaccatccatttcaaagcctttgattggcttttttgtaaataaaaataacttgttaagaaacaaatatatctgtcatagaagaactagaaaatccagggaagtgagaaaaatgaaaataaaaatcattcatagttttactagtagctaatcacagtcaacctcttttgtgtatcccaccagacttttttatattcatttgtttttagttaaaatataaaagtctcgtatattcccatttttctgcattgcattaccagaaggtagtggcgcctattaaatatgtgatatgttgttgtccagccatggcttctgcatttgcatgcttttgtgtgtgcatctgcaataccctgtgaatatcctgtgtgatggagtggcaagtacgcacagacacgtctgctgcatgcctaggtacgaggctgtctccaggagaagcacttgtttgattatttgagttgccaattgaatttgctgctttttttcatggcttgccattttcactgaaaagaatgactaatgaaaaacgatgattggttattagatttggatgtttggcagacattttctcaaaattgaactaagttggcctcttcacggaaaacaactggtatttgttgtgccaatgataaaattggagatttctagcaaaatgtataattttggaaaagttgtgttcctccactggaagcttgacagctttccttaacataaagacttctctttctcttcgctttcactactactactactaattcttcttctgattcttcttcttctccttcttccttcttccttccttcctcctcctcctccttcttcttcctcttcctcttcttctttctctctttccttccttcccttcccttccccttccttccttccttccttccttcctccctccctccctccctccctccctccctcctttctttttctttctctttctttctttctttctctctctctctctctttctttctttttctttctctttttctttctttcaagcagtcctcccgcctcagtcccccaaaatagtgggattacaggtgtgagccaccatgcacagccttacataaagccttttctaatgagatggatagtaattaacaaatgtgagtttttgatattatataaagattttttctgtgtttcgaagatccgtataactcagtgaatcagtatgttctggatgactaatatgtgatgttaagaaatcatgactgaggccgggcgcggtggctcacgcctgtaatcccagcactttgggaggccgaggcgggcggatcacgagatcaggagatcgagaccaccctggccaacatggtgaaaccccgtctctactaaaaatacaaaaattagctgggtgtgttggtgcgtgcctataatcccagctactcgggaggctgaggcaggagaatcgcttgaactcaggaggcggagattgcagtgagctgagactgcgccactgcaccccagcctggcgacagagcaagactccgtctcaaaaataaaaaaagaaatcatgactgggtaaaagatctgttcagagtacaagatggaccaatggatttgatatatttgaatataacagagtatgaaaaagtttattgatatagtttcagattacacactgcaactaatctttaagaaactattacttgtccactttttggtaaaatttcagagaacaatgtccaccattatctgaacaggctattaaaatactcttctcttttccaactacgtgcctgtgcaaagtcagatttttttcatatacttcagccaaaacagcatatcaaaatggattgaatgcagaagtagatctgagaatacagccacttttgttaagccagacaatgagatttgcaaaatgtaaacaatgctgctgttctcagtttttaaaaatatgttttttaaaagtatttatgttaatgtgtacttggtttactactgctatttttaaataaaacaagaaacatttttaaatgtctgttttaatttctaaagtggtagtgatagatataacccatattaataaaagctctttggggtcctcagtgatttttttttaagagtatggaagggttctcagacctaagagattgagaaatgctgatgtaatgttttattataaaggtgtaccatgaattatgtaccttacttcatattgttggacattaaagttgctttcagtttttttgttttaaa

SEQ ID NO: 566 - protein, 32 aa, Homo sapiens
MSEKKLETTAQQRKCPEWMNVQNKRCAVEERK

SEQ ID NO: 567 - protein, 37 aa, Homo sapiens
ACVRKSVFEDDLPFLEFTGSIVYSYDASDCSFLSEDI

SEQ ID NO: 568 - protein, 48 aa, Homo sapiens
MSLSDGDVVGFDMEWPPLYNRGKLGKVALIQLCVSESKCYLFHVSSMS

SEQ ID NO: 569 - protein, 49 aa, Homo sapiens
FPQGLKMLLENKAVKKAGVGIEGDQWKLLRDFDIKLKNFVELTDVANKK

SEQ ID NO: 570 - protein, 50 aa, Homo sapiens
LKCTETWSLNSLVKHLLGKQLLKDKSIRCSNWSKFPLTEDQKLYAATDAY

SEQ ID NO: 571 - protein, 23 aa, Homo sapiens
AGFIIYRNLEILDDTVQRFAINK

SEQ ID NO: 572 - protein, 37 aa, Homo sapiens
EEILLSDMNKQLTSISEEVMDLAKHLPHAFSKLENPR

SEQ ID NO: 573 - protein, 143 aa, Homo sapiens
VSILLKDISENLYSLRRMIIGSTNIETELRPSNNLNLLSFEDSTTGGVQQKQIREHEVLIHVEDETWDPTLDHLAKHDGEDVLGNKVERKEDGFEDGVEDNKLKENMERACLMSLDITEHELQILEQQSQEEYLSDIAYKSTE

SEQ ID NO: 574 - protein, 27 aa, Homo sapiens
HLSPNDNENDTSYVIESDEDLEMEMLK

SEQ ID NO: 575 - protein, 27 aa, Homo sapiens
HLSPNDNENDTSYVIESDEDLEMEMLK

SEQ ID NO: 576 - protein, 48 aa, Homo sapiens
SLENLNSGTVEPTHSKCLKMERNLGLPTKEEEEDDENEANEGEEDDDK

SEQ ID NO: 577 - protein, 24 aa, Homo sapiens
FLWPAPNEEQVTCLKMYFGHSSFK

SEQ ID NO: 578 - protein, 22 aa, Homo sapiens
VQWKVIHSVLEERRDNVAVMAT

SEQ ID NO: 579 - protein, 35 aa, Homo sapiens
YGKSLCFQYPPVYVGKIGLVISPLISLMEDQVLQL

SEQ ID NO: 580 - protein, 22 aa, Homo sapiens
MSNIPACFLGSAQSENVLTDIK

SEQ ID NO: 581 - protein, 27 aa, Homo sapiens
GKYRIVYVTPEYCSGNMGLLQQLEADI

SEQ ID NO: 582 - protein, 35 aa, Homo sapiens
ITLIAVDEAHCISEWGHDFRDSFRKLGSLKTALPM

SEQ ID NO: 583 - protein, 61 aa, Homo sapiens
VPIVALTATASSSIREDIVRCLNLRNPQITCTGFDRPNLYLEVRRKTGNILQDLQPFLVKT

SEQ ID NO: 584 - protein, 58 aa, Homo sapiens
SHWEFEGPTIIYCPSRKMTQQVTGELRKLNLSCGTYHAGMSFSTRKDIHHRFVRDEIQ

SEQ ID NO: 585 - protein, 60 aa, Homo sapiens
CVIATIAFGMGINKADIRQVIHYGAPKDMESYYQEIGRAGRDGLQSSCHVLWAPADINLN

SEQ ID NO: 586 - protein, 33 aa, Homo sapiens
HLLTEIRNEKFRLYKLKMMAKMEKYLHSSRCRR

SEQ ID NO: 587 - protein, 30 aa, Homo sapiens
IILSHFEDKQVQKASLGIMGTEKCCDNCRS

SEQ ID NO: 588 - protein, 47 aa, Homo sapiens
LDHCYSMDDSEDTSWDFGPQAFKLLSAVDILGEKFGIGLPILFLRGS

SEQ ID NO: 589 - protein, 57 aa, Homo sapiens
NSQRLADQYRRHSLFGTGKDQTESWWKAFSRQLITEGFLVEVSRYNKFMKICALTKK

SEQ ID NO: 590 - protein, 31 aa, Homo sapiens
GRNWLHKANTESQSLILQANEELCPKKLLLP

SEQ ID NO: 591 - protein, 25 aa, Homo sapiens
SKTVSSGTKEHCYNQVPVELSTEKK

SEQ ID NO: 592 - protein, 24 aa, Homo sapiens
SNLEKLYSYKPCDKISSGSNISKK

SEQ ID NO: 593 - protein, 25 aa, Homo sapiens
IMVQSPEKAYSSSQPVISAQEQETQ

SEQ ID NO: 594 - protein, 37 aa, Homo sapiens
IVLYGKLVEARQKHANKMDVPPAILATNKILVDMAKM

SEQ ID NO: 595 - protein, 38 aa, Homo sapiens
PTTVENVKRIDGVSEGKAAMLAPLLEVIKHFCQTNSVQ

SEQ ID NO: 596 - protein, 44 aa, Homo sapiens
TDLFSSTKPQEEQKTSLVAKNKICTLSQSMAITYSLFQEKKMPL

SEQ ID NO: 597 - protein, 54 aa, Homo sapiens
KSIAESRILPLMTIGMHLSQAVKAGCPLDLERAGLTPEVQKIIADVIRNPPVNS

SEQ ID NO: 598 - protein, 69 aa, Homo sapiens
MSKISLIRMLVPENIDTYLIHMAIEILKHGPDSGLQPSCDVNKRRCFPGSEEICSSSKRSKEEVGINTE

SEQ ID NO: 599 - protein, 35 aa, Homo sapiens
TSSAERKRRLPVWFAKGSDTSKKLMDKTKRGGLFS

SEQ ID NO: 600 - protein, 1432 aa, Homo sapiens
MSEKKLETTAQQRKCPEWMNVQNKRCAVEERKACVRKSVFEDDLPFLEFTGSIVYSYDASDCSFLSEDISMSLSDGDVVGFDMEWPPLYNRGKLGKVALIQLCVSESKCYLFHVSSMSVFPQGLKMLLENKAVKKAGVGIEGDQWKLLRDFDIKLKNFVELTDVANKKLKCTETWSLNSLVKHLLGKQLLKDKSIRCSNWSKFPLTEDQKLYAATDAYAGFIIYRNLEILDDTVQRFAINKEEEILLSDMNKQLTSISEEVMDLAKHLPHAFSKLENPRRVSILLKDISENLYSLRRMIIGSTNIETELRPSNNLNLLSFEDSTTGGVQQKQIREHEVLIHVEDETWDPTLDHLAKHDGEDVLGNKVERKEDGFEDGVEDNKLKENMERACLMSLDITEHELQILEQQSQEEYLSDIAYKSTEHLSPNDNENDTSYVIESDEDLEMEMLKHLSPNDNENDTSYVIESDEDLEMEMLKSLENLNSGTVEPTHSKCLKMERNLGLPTKEEEEDDENEANEGEEDDDKDFLWPAPNEEQVTCLKMYFGHSSFKPVQWKVIHSVLEERRDNVAVMATGYGKSLCFQYPPVYVGKIGLVISPLISLMEDQVLQLKMSNIPACFLGSAQSENVLTDIKLGKYRIVYVTPEYCSGNMGLLQQLEADIGITLIAVDEAHCISEWGHDFRDSFRKLGSLKTALPMVPIVALTATASSSIREDIVRCLNLRNPQITCTGFDRPNLYLEVRRKTGNILQDLQPFLVKTSSHWEFEGPTIIYCPSRKMTQQVTGELRKLNLSCGTYHAGMSFSTRKDIHHRFVRDEIQCVIATIAFGMGINKADIRQVIHYGAPKDMESYYQEIGRAGRDGLQSSCHVLWAPADINLNRHLLTEIRNEKFRLYKLKMMAKMEKYLHSSRCRRQIILSHFEDKQVQKASLGIMGTEKCCDNCRSRLDHCYSMDDSEDTSWDFGPQAFKLLSAVDILGEKFGIGLPILFLRGSNSQRLADQYRRHSLFGTGKDQTESWWKAFSRQLITEGFLVEVSRYNKFMKICALTKKGRNWLHKANTESQSLILQANEELCPKKLLLPSSKTVSSGTKEHCYNQVPVELSTEKKSNLEKLYSYKPCDKISSGSNISKKSIMVQSPEKAYSSSQPVISAQEQETQIVLYGKLVEARQKHANKMDVPPAILATNKILVDMAKMRPTTVENVKRIDGVSEGKAAMLAPLLEVIKHFCQTNSVQTDLFSSTKPQEEQKTSLVAKNKICTLSQSMAITYSLFQEKKMPLKSIAESRILPLMTIGMHLSQAVKAGCPLDLERAGLTPEVQKIIADVIRNPPVNSDMSKISLIRMLVPENIDTYLIHMAIEILKHGPDSGLQPSCDVNKRRCFPGSEEICSSSKRSKEEVGINTETSSAERKRRLPVWFAKGSDTSKKLMDKTKRGGLFS

SEQ ID NO: 601 - DNA, 4222 bp, Homo sapiens
gtgtactgtgtgcgccggggaggcgccggcttgtactcggcagcgcgggaataaagtttgctgatttggtgtctagcctggatgcctgggttgcaggccctgcttgtggtggcgctccacagtcatccggctgaagaagacctgttggactggatcttctcgggttttctttcagatattgttttgtatttacccatgaagacattgttttttggactctgcaaataggacatttcaaagatgagtgaaaaaaaattggaaacaactgcacagcagcggaaatgtcctgaatggatgaatgtgcagaataaaagatgtgctgtagaagaaagaaaggcatgtgttcggaagagtgtttttgaagatgacctccccttcttagaattcactggatccattgtgtatagttacgatgctagtgattgctctttcctgtcagaagatattagcatgagtctatcagatggggatgtggtgggatttgacatggagtggccaccattatacaatagagggaaacttggcaaagttgcactaattcagttgtgtgtttctgagagcaaatgttacttgttccacgtttcttccatgtcagtttttccccagggattaaaaatgttgcttgaaaataaagcagttaaaaaggcaggtgtaggaattgaaggagatcagtggaaacttctacgtgactttgatatcaaattgaagaattttgtggagttgacagatgttgccaataaaaagctgaaatgcacagagacctggagccttaacagtctggttaaacacctcttaggtaaacagctcctgaaagacaagtctatccgctgtagcaattggagtaaatttcctctcactgaggaccagaaactgtatgcagccactgatgcttatgctggttttattatttaccgaaatttagagattttggatgatactgtgcaaaggtttgctataaataaagaggaagaaatcctacttagcgacatgaacaaacagttgacttcaatctctgaggaagtgatggatctggctaagcatcttcctcatgctttcagtaaattggaaaacccacggagggtttctatcttactaaaggatatttcagaaaatctatattcactgaggaggatgataattgggtctactaacattgagactgaactgaggcccagcaataatttaaacttattatcctttgaagattcaactactgggggagtacaacagaaacaaattagagaacatgaagttttaattcacgttgaagatgaaacatgggacccaacacttgatcatttagctaaacatgatggagaagatgtacttggaaataaagtggaacgaaaagaagatggatttgaagatggagtagaagacaacaaattgaaagagaatatggaaagagcttgtttgatgtcgttagatattacagaacatgaactccaaattttggaacagcagtctcaggaagaatatcttagtgatattgcttataaatctactgagcatttatctcccaatgataatgaaaacgatacgtcctatgtaattgagagtgatgaagatttagaaatggagatgcttaagcatttatctcccaatgataatgaaaacgatacgtcctatgtaattgagagtgatgaagatttagaaatggagatgcttaagtctttagaaaacctcaatagtggcacggtagaaccaactcattctaaatgcttaaaaatggaaagaaatctgggtcttcctactaaagaagaagaagaagatgatgaaaatgaagctaatgaaggggaagaagatgatgataaggactttttgtggccagcacccaatgaagagcaagttacttgcctcaagatgtactttggccattccagttttaaaccagttcagtggaaagtgattcattcagtattagaagaaagaagagataatgttgctgtcatggcaactggatatggaaagagtttgtgcttccagtatccacctgtttatgtaggcaagattggccttgttatctctccccttatttctctgatggaagaccaagtgctacagcttaaaatgtccaacatcccagcttgcttccttggatcagcacagtcagaaaatgttctaacagatattaaattaggtaaataccggattgtatacgtaactccagaatactgttcaggtaacatgggcctgctccagcaacttgaggctgatattggtatcacgctcattgctgtggatgaggctcactgtatttctgagtgggggcatgattttagggattcattcaggaagttgggctccctaaagacagcactgccaatggttccaatcgttgcacttactgctactgcaagttcttcaatccgggaagacattgtacgttgcttaaatctgagaaatcctcagatcacctgtactggttttgatcgaccaaacctgtatttagaagttaggcgaaaaacagggaatatccttcaggatctgcagccatttcttgtcaaaacaagttcccactgggaatttgaaggtccaacaatcatctactgtccttctagaaaaatgacacaacaagttacaggtgaacttaggaaactgaatctatcctgtggaacataccatgcgggcatgagttttagcacaaggaaagacattcatcataggtttgtaagagatgaaattcagtgtgtcatagctaccatagcttttggaatgggcattaataaagctgacattcgccaagtcattcattacggtgctcctaaggacatggaatcatattatcaggagattggtagagctggtcgtgatggacttcaaagttcttgtcacgtcctctgggctcctgcagacattaacttaaataggcaccttcttactgagatacgtaatgagaagtttcgattatacaaattaaagatgatggcaaagatggaaaaatatcttcattctagcagatgtaggagacaaatcatcttgtctcattttgaggacaaacaagtacaaaaagcctccttgggaattatgggaactgaaaaatgctgtgataattgcaggtccagattggatcattgctattccatggatgactcagaggatacatcctgggactttggtccacaagcatttaagcttttgtctgctgtggacatcttaggcgaaaaatttggaattgggcttccaattttatttctccgaggatctaattctcagcgtcttgccgatcaatatcgcaggcacagtttatttggcactggcaaggatcaaacagagagttggtggaaggctttttcccgtcagctgatcactgagggattcttggtagaagtttctcggtataacaaatttatgaagatttgcgcccttacgaaaaagggtagaaattggcttcataaagctaatacagaatctcagagcctcatccttcaagctaatgaagaattgtgtccaaagaagttgcttctgcctagttcgaaaactgtatcttcgggcaccaaagagcattgttataatcaagtaccagttgaattaagtacagagaagaagtctaacttggagaagttatattcttataaaccatgtgataagatttcttctgggagtaacatttctaaaaaaagtatcatggtacagtcaccagaaaaagcttacagttcctcacagcctgttatttcggcacaagagcaggagactcagattgtgttatatggcaaattggtagaagctaggcagaaacatgccaataaaatggatgttcccccagctattctggcaacaaacaagatactggtggatatggccaaaatgagaccaactacggttgaaaacgtaaaaaggattgatggtgtttctgaaggcaaagctgccatgttggcccctctgttggaagtcatcaaacatttctgccaaacaaatagtgttcagacagacctcttttcaagtacaaaacctcaagaagaacagaagacgagtctggtagcaaaaaataaaatatgcacactttcacagtctatggccatcacatactctttattccaagaaaagaagatgcctttgaagagcatagctgagagcaggattctgcctctcatgacaattggcatgcacttatcccaagcggtgaaagctggctgcccccttgatttggagcgagcaggcctgactccagaggttcagaagattattgctgatgttatccgaaaccctcccgtcaactcag

SEQ ID NO: 602 - protein, 1327 aa, Homo sapiens
MSEKKLETTAQQRKCPEWMNVQNKRCAVEERKACVRKSVFEDDLPFLEFTGSIVYSYDASDCSFLSEDISMSLSDGDVVGFDMEWPPLYNRGKLGKVALIQLCVSESKCYLFHVSSMSVFPQGLKMLLENKAVKKAGVGIEGDQWKLLRDFDIKLKNFVELTDVANKKLKCTETWSLNSLVKHLLGKQLLKDKSIRCSNWSKFPLTEDQKLYAATDAYAGFIIYRNLEILDDTVQRFAINKEEEILLSDMNKQLTSISEEVMDLAKHLPHAFSKLENPRRVSILLKDISENLYSLRRMIIGSTNIETELRPSNNLNLLSFEDSTTGGVQQKQIREHEVLIHVEDETWDPTLDHLAKHDGEDVLGNKVERKEDGFEDGVEDNKLKENMERACLMSLDITEHELQILEQQSQEEYLSDIAYKSTEHLSPNDNENDTSYVIESDEDLEMEMLKHLSPNDNENDTSYVIESDEDLEMEMLKSLENLNSGTVEPTHSKCLKMERNLGLPTKEEEEDDENEANEGEEDDDKDFLWPAPNEEQVTCLKMYFGHSSFKPVQWKVIHSVLEERRDNVAVMATGYGKSLCFQYPPVYVGKIGLVISPLISLMEDQVLQLKMSNIPACFLGSAQSENVLTDIKLGKYRIVYVTPEYCSGNMGLLQQLEADIGITLIAVDEAHCISEWGHDFRDSFRKLGSLKTALPMVPIVALTATASSSIREDIVRCLNLRNPQITCTGFDRPNLYLEVRRKTGNILQDLQPFLVKTSSHWEFEGPTIIYCPSRKMTQQVTGELRKLNLSCGTYHAGMSFSTRKDIHHRFVRDEIQCVIATIAFGMGINKADIRQVIHYGAPKDMESYYQEIGRAGRDGLQSSCHVLWAPADINLNRHLLTEIRNEKFRLYKLKMMAKMEKYLHSSRCRRQIILSHFEDKQVQKASLGIMGTEKCCDNCRSRLDHCYSMDDSEDTSWDFGPQAFKLLSAVDILGEKFGIGLPILFLRGSNSQRLADQYRRHSLFGTGKDQTESWWKAFSRQLITEGFLVEVSRYNKFMKICALTKKGRNWLHKANTESQSLILQANEELCPKKLLLPSSKTVSSGTKEHCYNQVPVELSTEKKSNLEKLYSYKPCDKISSGSNISKKSIMVQSPEKAYSSSQPVISAQEQETQIVLYGKLVEARQKHANKMDVPPAILATNKILVDMAKMRPTTVENVKRIDGVSEGKAAMLAPLLEVIKHFCQTNSVQTDLFSSTKPQEEQKTSLVAKNKICTLSQSMAITYSLFQEKKMPLKSIAESRILPLMTIGMHLSQAVKAGCPLDLERAGLTPEVQKIIADVIRNPPVNS

SEQ ID NO: 603 - DNA, 75 bp, Homo sapiens
gaaggaaactgtttaaccggatcccattgtacccagagtgcagagccgcctttccagcatgcaggggctgctcag

SEQ ID NO: 604 - DNA, 75 bp, Homo sapiens
gacagagagggaggaggcgcgcggggacggggacgcccaggaggacccactcgcgggtcccgctccgctccggca

SEQ ID NO: 605 - DNA, 150 bp, Homo sapiens
gaaggaaactgtttaaccggatcccattgtacccagagtgcagagccgcctttccagcatgcaggggctgctcaggacagagagggaggaggcgcgcggggacggggacgcccaggaggacccactcgcgggtcccgctccgctccggca

SEQ ID NO: 606 - DNA, 102 bp, Homo sapiens
gcgagttagtaacctacgagcggctgtgaaggaaactgtttaaccggatcccattgtacccagagtgcagagccgcctttccagcatgcaggggctgctcag

SEQ ID NO: 607 - DNA, 220 bp, Homo sapiens
cgtttagtcacatcaagaaatagaacagaattcagccatggccccaagaaagagaggtggacgaggtatttcattcatcttttgctgtttccgaaataatgatcacccagaaatcacgtatcggctgcgaaatgatagcaactttgcgcttcagaccatggaaccagcattgcccatgccccctgtggaggagctggatgtcatgttcagtgaactggtg

SEQ ID NO: 608 - DNA, 90 bp, Homo sapiens
gatgaactggacctcacagacaaacacagagaagccatgtttgcacttccagctgagaaaaaatggcaaatatactgtagcaagaaaaag

SEQ ID NO: 609 - DNA, 72 bp, Homo sapiens
gaccaggaagaaaacaagggagctacaagttggcctgaattctacattgatcagctcaattccatggctgct

SEQ ID NO: 610 - DNA, 95 bp, Homo sapiens
agaaaatctctgctggctttagagaaggaagaagaagaagaaagaagtaaaactatagagagtttaaagacagcactgaggacaaaaccaatgag

SEQ ID NO: 611 - DNA, 334 bp, Homo sapiens
gtttgtaaccagattcatcgacttggatggcctatcatgtatcctcaactttctaaagaccatggactacgagacctcagagtctcgaatacatacttctctcattggctgtataaaggcgttaatgaacaactctcaaggccgggctcacgtcctggctcattctgagagtattaatgtaattgctcagagtctgagcacagagaacattaaaacgaaggtggccgtgctggaaatcttgggcgccgtgtgcctggttcccgggggccacaagaaggttctgcaggccatgctgcactaccagaagtatgccagcgaaaggacccgctttcag

SEQ ID NO: 612 - DNA, 111 bp, Homo sapiens
acattaattaacgacttggataaaagcactgggcggtatcgagatgaagtgagtctcaagactgccatcatgtccttcattaatgcagtgctcagccaaggtgcaggagtg

SEQ ID NO: 613 - DNA, 104 bp, Homo sapiens
gagagtttggactttagacttcatcttcgctatgaatttctgatgttaggaattcaacctgtaatagataaattaagggaacacgaaaattcaacattagatag

SEQ ID NO: 614 - DNA, 67 bp, Homo sapiens
gcatttagacttttttgaaatgctccgaaatgaagatgaactagaatttgccaaaagatttgaactg

SEQ ID NO: 615 - DNA, 118 bp, Homo sapiens
gttcacatagacacaaaaagtgcaactcagatgtttgagctgaccaggaagaggctgacacatagtgaagcttacccgcatttcatgtccatcctgcaccactgcctccaaatgcctt

SEQ ID NO: 616 - DNA, 139 bp, Homo sapiens
acaagaggagtggcaacactgttcagtactggctactactagatagaattatacagcagatagttatccagaatgacaaaggacaggaccctgactccacacctttggaaaactttaatattaagaatgtcgtacgaat

SEQ ID NO: 617 - DNA, 59 bp, Homo sapiens
gttggttaatgaaaatgaagttaagcagtggaaagaacaagcggaaaaaatgagaaaag

SEQ ID NO: 618 - DNA, 188 bp, Homo sapiens
agcacaatgagctacaacagaaactggaaaagaaagaacgagaatgtgatgctaagactcaagagaaggaagagatgatgcagaccttaaataaaatgaaagagaaacttgaaaaggagactactgagcataagcaagtcaagcagcaggtggcggacctcacagcacagctccatgagctcagcagg

SEQ ID NO: 619 - DNA, 300 bp, Homo sapiens
agggccgtctgtgcttcaatcccaggtggaccctcgcctggagcaccaggagggccctttccttcctctgtgcctggatctctccttcctcccccaccacccccacctctaccaggtgggatgcttccccctccaccgcctcccctccctccaggtggccctcctcctcccccagggcctcctcccttaggggcaatcatgccacctcctggtgctccaatgggcctagcactgaagaagaaaagcattcctcagcccacaaatgccctgaaatccttcaactggtctaaactgcccgag

SEQ ID NO: 620 - DNA, 108 bp, Homo sapiens
aacaaactggaaggaacagtatggaccgaaattgatgatacaaaagtcttcaaaattctagatcttgaagacctggaaagaaccttctctgcctatcaaagacagcag

SEQ ID NO: 621 - DNA, 107 bp, Homo sapiens
aaagaagcagatgccattgatgacactctgagttccaaacttaaagttaaagagctttcggtgattgatggtcggagagctcagaattgcaacatccttctatcgag

SEQ ID NO: 622 - DNA, 85 bp, Homo sapiens
gttgaaattatccaatgacgaaatcaaacgggcaattctaacaatggacgaacaggaagatctgcccaaggacatgttggaacag

SEQ ID NO: 623 - DNA, 107 bp, Homo sapiens
ctcttgaaatttgttcctgaaaaaagtgacattgacctattggaggaacataaacacgaactggatcggatggccaaggctgataggttcctttttgagatgagccg

SEQ ID NO: 624 - DNA, 89 bp, Homo sapiens
aattaatcactatcagcaaaggttgcaatcgctgtacttcaaaaagaagtttgcagagcgtgtggcagaagtgaaacctaaagtggaag

SEQ ID NO: 625 - DNA, 169 bp, Homo sapiens
caattcgttctggctcagaagaggtgtttaggagtggtgccctcaagcagttgctggaggtggttttggcatttggaaattatatgaataaaggtcaaagagggaatgcatatggattcaagatatctagcctaaacaaaattgctgacacaaaatccagcatcgacaa

SEQ ID NO: 626 - DNA, 108 bp, Homo sapiens
aaacattacccttttgcactatctcatcactattgtggaaaataagtaccccagtgttctcaatctaaatgaagaattgcgagatattcctcaagctgcgaaagtaaa

SEQ ID NO: 627 - DNA, 61 bp, Homo sapiens
catgactgagctggacaaagaaataagtaccttgagaagtggcttgaaagcagtagagaca

SEQ ID NO: 628 - DNA, 132 bp, Homo sapiens
gagctggaatatcagaagtctcagcccccacagcccggagataagtttgtgtctgttgtcagccagttcatcacagtagccagcttcagcttctctgatgttgaagaccttctagcagaagctaaagacctg

SEQ ID NO: 629 - DNA, 171 bp, Homo sapiens
tttactaaagcagtgaagcactttggggaagaggctggcaaaatacaaccagatgagttctttggcatttttgatcaatttcttcaagctgtgtcagaagccaaacaagaaaacgaaaatatgagaaagaaaaaggaggaagaagaacgtcgagctcgcatggaagctcag

SEQ ID NO: 630 - DNA, 2754 bp, Homo sapiens
ctcaaagaacaacgtgaaagggaacgtaaaatgagaaaagctaaagagaatagtgaagaaagcggagagtttgatgaccttgtttcagctttacgctcaggagaagtgtttgacaaagacctttctaaattgaaacggaatcgcaaacgtattaccaaccagatgactgacagcagcagagagagaccaatcacaaaacttaatttctaattttccatgaatacttttttttagaaagctcattagcagccctctaaagtgactagaacgtttcattacactgccttgcaatccaaacagtggcaattttttccttcatctgtgagtgaatgtgtgaacgtgtgtatgtaaatgtatgtgtgtatatattaaaaaatgtatatagatgtctgagtgttgtctggagacctatacgtatggttaaaaagatttatgttaatgtatgtgctccaaaacctttcgtgtatgcattcacattgagtgtggctcattttctttccccgaacgccatgactgttcagaagcacaatactatctcctgaaagagataagagacattccctagattcaaaggcaaaacagaagaaacaaacaaacaaacaaaaaaagcttgcaaaatattttatggtttccaagcttgatatcctttaaaattattttcattgatggaactggagttgttggaaaaacatagatttaaaatgatttttgatagctgacattgtgatgttgatgtatcacatcagtaataggaccagctttgaatttctgacattggtgtggggatacagtctgtaaatgtttattgagaacatcttgcacacaatttgaattatgtagaatgtcaatcaagtttttgtatatttaaaagttggacatcaattttttcccctgatttcatcaagttatctctgccaagtgctcttgataatttcttcagatttttggaaaaaaacactatataaatgcaatccatgctttttttaaagaacaacattgccagagtatgcttgttctaacaatatagatatataaaccttaaaaataataaaatatctcacccaagacttaaaggaagaattctctgaagggataaagattactaaaaaaaaaaaaaaaaaaaaaaaattaatggggtgcctttttgttatagtttctattttctgttttgtaggacaagctgcattttctgtaaatataggtctggactaaaggatacataaagaatgcacaaaatgtcaacatcagcagagatgcccagatctatttatctctaagtatatttgaagtgattgctgtttatatgttgtcattttaaaattgtgtgtcagtaaagctacctgtaaaatttcagtccaaaaaaataaagctctcagggagacatgaataaaatcaatgaacattagaaaataaaatatagatgcttaccattaacctaccaactcttaatatccttaaattatgtgatatataaagaggactgttacttttttacttttttttttttttttttttttttttggctttgctttatttatttgtagttgggggctaacgttttctcttttctttctattgatcctgttgtggttgggtttcctgtggagagagtagtttgtcctgttgcactagaacattatttactcactaaattgagtttttcagtcaattaacaaatatttattaagttcctactatgtaccaggcatagtagggctacaatggtaagcaagacagagtccctgcccccaaagagcttatattctaatggggatattaagggatgaatagaataccaatgtgtgcactgtacaggaatcatactatttaaaaataatttgtataaactataatgcttagcacagatggcgagttatctgtgctatgtgaaagctgtgaaatagtgctctaagagttgtcaagagctgtggttttacatcttttcctcattgcaaatttagtgactttctacacactatatggaaataaatgactagcaaataaaacagtcataaatacaaagcagaggttgcactcccccaatcccgagttaacccaggtctgcaataacaccatgttaaaggtgcagatagagacttggctcaaaaaggcttggagatgaggaagattggaatataatgatggttttgtctgttccttaactaaagtgcctctatgtatattcttttctatttgtagcaggataaatttggtctggctcagttttggaactgtattttgaaaatggctttgtcttacagtttaaggaatagacaggtggagggaaagtcacataaaggagcaagtttgtgtagctgtccctcttgccccttttaatcatcctcctttgatatggccatcctggtgggcctcctttgccatttccatttttggtttctttccctgaaaactgtgtgcaggtaattccatgtgccattgttgaaaagaaaaaaaaaaaacaaaaaaaaaacctactttttagattggtgctggtgtaagtagccacttttctctcttgggtgtgtattttaaactttttttgtttttttaaattaatgccaaaaagaaaatgcataatttgtaaacttaattatatgtcttatatcttattagcttagtagttggaaccacttagtctttaggtgcaagactgttgttagatagtactgagaaaaaaaaagtatgtgttatgagactgtacatgtttttttaaaaatagcaatatgcaataaagagatgaattcattgggtgta

SEQ ID NO: 631 - DNA, 5890 bp, Artificial Sequence
  Full mRNA polynucleotide sequence of DAAM1
gcgagttagtaacctacgagcggctgtgaaggaaactgtttaaccggatcccattgtacccagagtgcagagccgcctttccagcatgcaggggctgctcagcgtttagtcacatcaagaaatagaacagaattcagccatggccccaagaaagagaggtggacgaggtatttcattcatcttttgctgtttccgaaataatgatcacccagaaatcacgtatcggctgcgaaatgatagcaactttgcgcttcagaccatggaaccagcattgcccatgccccctgtggaggagctggatgtcatgttcagtgaactggtggatgaactggacctcacagacaaacacagagaagccatgtttgcacttccagctgagaaaaaatggcaaatatactgtagcaagaaaaaggaccaggaagaaaacaagggagctacaagttggcctgaattctacattgatcagctcaattccatggctgctagaaaatctctgctggctttagagaaggaagaagaagaagaaagaagtaaaactatagagagtttaaagacagcactgaggacaaaaccaatgaggtttgtaaccagattcatcgacttggatggcctatcatgtatcctcaactttctaaagaccatggactacgagacctcagagtctcgaatacatacttctctcattggctgtataaaggcgttaatgaacaactctcaaggccgggctcacgtcctggctcattctgagagtattaatgtaattgctcagagtctgagcacagagaacattaaaacgaaggtggccgtgctggaaatcttgggcgccgtgtgcctggttcccgggggccacaagaaggttctgcaggccatgctgcactaccagaagtatgccagcgaaaggacccgctttcagacattaattaacgacttggataaaagcactgggcggtatcgagatgaagtgagtctcaagactgccatcatgtccttcattaatgcagtgctcagccaaggtgcaggagtggagagtttggactttagacttcatcttcgctatgaatttctgatgttaggaattcaacctgtaatagataaattaagggaacacgaaaattcaacattagataggcatttagacttttttgaaatgctccgaaatgaagatgaactagaatttgccaaaagatttgaactggttcacatagacacaaaaagtgcaactcagatgtttgagctgaccaggaagaggctgacacatagtgaagcttacccgcatttcatgtccatcctgcaccactgcctccaaatgccttacaagaggagtggcaacactgttcagtactggctactactagatagaattatacagcagatagttatccagaatgacaaaggacaggaccctgactccacacctttggaaaactttaatattaagaatgtcgtacgaatgttggttaatgaaaatgaagttaagcagtggaaagaacaagcggaaaaaatgagaaaagagcacaatgagctacaacagaaactggaaaagaaagaacgagaatgtgatgctaagactcaagagaaggaagagatgatgcagaccttaaataaaatgaaagagaaacttgaaaaggagactactgagcataagcaagtcaagcagcaggtggcggacctcacagcacagctccatgagctcagcaggagggccgtctgtgcttcaatcccaggtggaccctcgcctggagcaccaggagggccctttccttcctctgtgcctggatctctccttcctcccccaccacccccacctctaccaggtgggatgcttccccctccaccgcctcccctccctccaggtggccctcctcctcccccagggcctcctcccttaggggcaatcatgccacctcctggtgctccaatgggcctagcactgaagaagaaaagcattcctcagcccacaaatgccctgaaatccttcaactggtctaaactgcccgagaacaaactggaaggaacagtatggaccgaaattgatgatacaaaagtcttcaaaattctagatcttgaagacctggaaagaaccttctctgcctatcaaagacagcagaaagaagcagatgccattgatgacactctgagttccaaacttaaagttaaagagctttcggtgattgatggtcggagagctcagaattgcaacatccttctatcgaggttgaaattatccaatgacgaaatcaaacgggcaattctaacaatggacgaacaggaagatctgcccaaggacatgttggaacagctcttgaaatttgttcctgaaaaaagtgacattgacctattggaggaacataaacacgaactggatcggatggccaaggctgataggttcctttttgagatgagccgaattaatcactatcagcaaaggttgcaatcgctgtacttcaaaaagaagtttgcagagcgtgtggcagaagtgaaacctaaagtggaagcaattcgttctggctcagaagaggtgtttaggagtggtgccctcaagcagttgctggaggtggttttggcatttggaaattatatgaataaaggtcaaagagggaatgcatatggattcaagatatctagcctaaacaaaattgctgacacaaaatccagcatcgacaaaaacattacccttttgcactatctcatcactattgtggaaaataagtaccccagtgttctcaatctaaatgaagaattgcgagatattcctcaagctgcgaaagtaaacatgactgagctggacaaagaaataagtaccttgagaagtggcttgaaagcagtagagacagagctggaatatcagaagtctcagcccccacagcccggagataagtttgtgtctgttgtcagccagttcatcacagtagccagcttcagcttctctgatgttgaagaccttctagcagaagctaaagacctgtttactaaagcagtgaagcactttggggaagaggctggcaaaatacaaccagatgagttctttggcatttttgatcaatttcttcaagctgtgtcagaagccaaacaagaaaacgaaaatatgagaaagaaaaaggaggaagaagaacgtcgagctcgcatggaagctcagctcaaagaacaacgtgaaagggaacgtaaaatgagaaaagctaaagagaatagtgaagaaagcggagagtttgatgaccttgtttcagctttacgctcaggagaagtgtttgacaaagacctttctaaattgaaacggaatcgcaaacgtattaccaaccagatgactgacagcagcagagagagaccaatcacaaaacttaatttctaattttccatgaatacttttttttagaaagctcattagcagccctctaaagtgactagaacgtttcattacactgccttgcaatccaaacagtggcaattttttccttcatctgtgagtgaatgtgtgaacgtgtgtatgtaaatgtatgtgtgtatatattaaaaaatgtatatagatgtctgagtgttgtctggagacctatacgtatggttaaaaagatttatgttaatgtatgtgctccaaaacctttcgtgtatgcattcacattgagtgtggctcattttctttccccgaacgccatgactgttcagaagcacaatactatctcctgaaagagataagagacattccctagattcaaaggcaaaacagaagaaacaaacaaacaaacaaaaaaagcttgcaaaatattttatggtttccaagcttgatatcctttaaaattattttcattgatggaactggagttgttggaaaaacatagatttaaaatgatttttgatagctgacattgtgatgttgatgtatcacatcagtaataggaccagctttgaatttctgacattggtgtggggatacagtctgtaaatgtttattgagaacatcttgcacacaatttgaattatgtagaatgtcaatcaagtttttgtatatttaaaagttggacatcaattttttcccctgatttcatcaagttatctctgccaagtgctcttgataatttcttcagatttttggaaaaaaacactatataaatgcaatccatgctttttttaaagaacaacattgccagagtatgcttgttctaacaatatagatatataaaccttaaaaataataaaatatctcacccaagacttaaaggaagaattctctgaagggataaagattactaaaaaaaaaaaaaaaaaaaaaaaattaatggggtgcctttttgttatagtttctattttctgttttgtaggacaagctgcattttctgtaaatataggtctggactaaaggatacataaagaatgcacaaaatgtcaacatcagcagagatgcccagatctatttatctctaagtatatttgaagtgattgctgtttatatgttgtcattttaaaattgtgtgtcagtaaagctacctgtaaaatttcagtccaaaaaaataaagctctcagggagacatgaataaaatcaatgaacattagaaaataaaatatagatgcttaccattaacctaccaactcttaatatccttaaattatgtgatatataaagaggactgttacttttttacttttttttttttttttttttttttttggctttgctttatttatttgtagttgggggctaacgttttctcttttctttctattgatcctgttgtggttgggtttcctgtggagagagtagtttgtcctgttgcactagaacattatttactcactaaattgagtttttcagtcaattaacaaatatttattaagttcctactatgtaccaggcatagtagggctacaatggtaagcaagacagagtccctgcccccaaagagcttatattctaatggggatattaagggatgaatagaataccaatgtgtgcactgtacaggaatcatactatttaaaaataatttgtataaactataatgcttagcacagatggcgagttatctgtgctatgtgaaagctgtgaaatagtgctctaagagttgtcaagagctgtggttttacatcttttcctcattgcaaatttagtgactttctacacactatatggaaataaatgactagcaaataaaacagtcataaatacaaagcagaggttgcactcccccaatcccgagttaacccaggtctgcaataacaccatgttaaaggtgcagatagagacttggctcaaaaaggcttggagatgaggaagattggaatataatgatggttttgtctgttccttaactaaagtgcctctatgtatattcttttctatttgtagcaggataaatttggtctggctcagttttggaactgtattttgaaaatggctttgtcttacagtttaaggaatagacaggtggagggaaagtcacataaaggagcaagtttgtgtagctgtccctcttgccccttttaatcatcctcctttgatatggccatcctggtgggcctcctttgccatttccatttttggtttctttccctgaaaactgtgtgcaggtaattccatgtgccattgttgaaaagaaaaaaaaaaaacaaaaaaaaaacctactttttagattggtgctggtgtaagtagccacttttctctcttgggtgtgtattttaaactttttttgtttttttaaattaatgccaaaaagaaaatgcataatttgtaaacttaattatatgtcttatatcttattagcttagtagttggaaccacttagtctttaggtgcaagactgttgttagatagtactgagaaaaaaaaagtatgtgttatgagactgtacatgtttttttaaaaatagcaatatgcaataaagagatgaattcattgggtgta

SEQ ID NO: 632 - protein, 1068 aa, Homo sapiens
MAPRKRGGRGISFIFCCFRNNDHPEITYRLRNDSNFALQTMEPALPMPPVEELDVMFSELVDELDLTDKHREAMFALPAEKKWQIYCSKKKDQEENKGATSWPEFYIDQLNSMAARKSLLALEKEEEEERSKTIESLKTALRTKPMRFVTRFIDLDGLSCILNFLKTMDYETSESRIHTSLIGCIKALMNNSQGRAHVLAHSESINVIAQSLSTENIKTKVAVLEILGAVCLVPGGHKKVLQAMLHYQKYASERTRFQTLINDLDKSTGRYRDEVSLKTAIMSFINAVLSQGAGVESLDFRLHLRYEFLMLGIQPVIDKLREHENSTLDRHLDFFEMLRNEDELEFAKRFELVHIDTKSATQMFELTRKRLTHSEAYPHFMSILHHCLQMPYKRSGNTVQYWLLLDRIIQQIVIQNDKGQDPDSTPLENFNIKNVVRMLVNENEVKQWKEQAEKMRKEHNELQQKLEKKERECDAKTQEKEEMMQTLNKMKEKLEKETTEHKQVKQQVADLTAQLHELSRRAVCASIPGGPSPGAPGGPFPSSVPGSLLPPPPPPPLPGGMLPPPPPPLPPGGPPPPPGPPPLGAIMPPPGAPMGLALKKKSIPQPTNALKSFNWSKLPENKLEGTVWTEIDDTKVFKILDLEDLERTFSAYQRQQKEADAIDDTLSSKLKVKELSVIDGRRAQNCNILLSRLKLSNDEIKRAILTMDEQEDLPKDMLEQLLKFVPEKSDIDLLEEHKHELDRMAKADRFLFEMSRINHYQQRLQSLYFKKKFAERVAEVKPKVEAIRSGSEEVFRSGALKQLLEVVLAFGNYMNKGQRGNAYGFKISSLNKIADTKSSIDKNITLLHYLITIVENKYPSVLNLNEELRDIPQAAKVNMTELDKEISTLRSGLKAVETELEYQKSQPPQPGDKFVSVVSQFITVASFSFSDVEDLLAEAKDLFTKAVKHFGEEAGKIQPDEFFGIFDQFLQAVSEAKQENENMRKKKEEEERRARMEAQLKEQRERERKMRKAKENSEESGEFDDLVSALRSGEVFDKDLSKLKRNRKRITNQMTDSSRERPITKLNF

SEQ ID NO: 633 - DNA, 75 bp, Homo sapiens
aaggtctcttcctgcctgaggatgaaaacctgagggaaaaaggggactggagccagttcacgctgtggcagcaag

SEQ ID NO: 634 - DNA, 75 bp, Homo sapiens
ccttgcctccccgattgaaagagatgaaaagccaggaatcggctgcaggttccaaactagtccttcggtgtgaaa

SEQ ID NO: 635 - DNA, 150 bp, Homo sapiens
aaggtctcttcctgcctgaggatgaaaacctgagggaaaaaggggactggagccagttcacgctgtggcagcaagccttgcctccccgattgaaagagatgaaaagccaggaatcggctgcaggttccaaactagtccttcggtgtgaaa

SEQ ID NO: 636 - protein, 49 aa, Homo sapiens
GLFLPEDENLREKGDWSQFTLWQQALPPRLKEMKSQESAAGSKLVLRCE

SEQ ID NO: 637 - DNA, 139 bp, Homo sapiens
agtctcaagctctggtaggcaagtgcatgcagtgtgcctaaaacctgccagcagtacttttgagtttttttttttgttttgttttactttagcatttattattcatggattgaagaaatcaaaatggctgaagataaag

SEQ ID NO: 638 - DNA, 150 bp, Homo sapiens
agacaaagcatggaggacacaagaatgggaggaaaggcggactctcaggaacttcattcttcacgtggtttatggtgattgcattgctgggcgtctggacatctgtagctgtcgtttggtttgatcttgttgactatgaggaagttctag

SEQ ID NO: 639 - DNA, 69 bp, Homo sapiens
gaaaactaggaatctatgatgctgatggtgatggagattttgatgtggatgatgccaaagttttattag

SEQ ID NO: 640 - DNA, 93 bp, Homo sapiens
gacttaaagagagatctacttcagagccagcagtcccgccagaagaggctgagccacacactgagcccgaggagcaggttcctgtggaggcag

SEQ ID NO: 641 - DNA, 75 bp, Homo sapiens
aaccccagaatatcgaagatgaagcaaaagaacaaattcagtcccttctccatgaaatggtacacgcagaacatg

SEQ ID NO: 642 - DNA, 129 bp, Homo sapiens
ttgagggagaagacttgcaacaagaagatggacccacaggagaaccacaacaagaggatgatgagtttcttatggcgactgatgtagatgatagatttgagaccctggaacctgaagtatctcatgaag

SEQ ID NO: 643 - DNA, 33 bp, Homo sapiens
aaaccgagcatagttaccacgtggaagagacag

SEQ ID NO: 644 - DNA, 57 bp, Homo sapiens
tttcacaagactgtaatcaggatatggaagagatgatgtctgagcaggaaaatccag

SEQ ID NO: 645 - DNA, 48 bp, Homo sapiens
attccagtgaaccagtagtagaagatgaaagattgcaccatgatacag

SEQ ID NO: 646 - DNA, 33 bp, Homo sapiens
atgatgtaacataccaagtctatgaggaacaag

SEQ ID NO: 647 - DNA, 42 bp, Homo sapiens
cagtatatgaacctctagaaaatgaagggatagaaatcacag

SEQ ID NO: 648 - DNA, 57 bp, Homo sapiens
aagtaactgctccccctgaggataatcctgtagaagattcacaggtaattgtagaag

SEQ ID NO: 649 - DNA, 45 bp, Homo sapiens
aagtaagcatttttcctgtggaagaacagcaggaagtaccaccag

SEQ ID NO: 650 - DNA, 42 bp, Homo sapiens
aaacaaatagaaaaacagatgatccagaacaaaaagcaaaag

SEQ ID NO: 651 - DNA, 86 bp, Homo sapiens
ttaagaaaaagaagcctaaacttttaaataaatttgataagactattaaagctgaacttgatgctgcagaaaaactccgtaaaagg

SEQ ID NO: 652 - DNA, 87 bp, Homo sapiens
ggaaaaattgaggaagcagtgaatgcatttaaagaactagtacgcaaataccctcagagtccacgagcaagatatgggaaggcgcag

SEQ ID NO: 653 - DNA, 151 bp, Homo sapiens
tgtgaggatgatttggctgagaagaggagaagtaatgaggtgctacgtggagccatcgagacctaccaagaggtggccagcctacctgatgtccctgcagacctgctgaagctgagtttgaagcgtcgctcagacaggcaacaatttctag

SEQ ID NO: 654 - DNA, 137 bp, Homo sapiens
gtcatatgagaggttccctgcttaccctgcagagattagttcaactatttcccaatgatacttccttaaaaaatgaccttggcgtgggatacctcttgataggagataatgacaatgcaaagaaagtttatgaagag

SEQ ID NO: 655 - DNA, 99 bp, Homo sapiens
gtgctgagtgtgacacctaatgatggctttgctaaagtccattatggcttcatcctgaaggcacagaacaaaattgctgagagcatcccatatttaaag

SEQ ID NO: 656 - DNA, 90 bp, Homo sapiens
gaaggaatagaatccggagatcctggcactgatgatgggagattttatttccacctgggggatgccatgcagagggttgggaacaaagag

SEQ ID NO: 657 - DNA, 138 bp, Homo sapiens
gcatataagtggtatgagcttgggcacaagagaggacactttgcatctgtctggcaacgctcactctacaatgtgaatggactgaaagcacagccttggtggaccccaaaagaaacgggctacacagagttagtaaag

SEQ ID NO: 658 - DNA, 136 bp, Homo sapiens
tctttagaaagaaactggaagttaatccgagatgaaggccttgcagtgatggataaagccaaaggtctcttcctgcctgaggatgaaaacctgagggaaaaaggggactggagccagttcacgctgtggcagcaag

SEQ ID NO: 659 - DNA, 92 bp, Homo sapiens
gaagaagaaatgaaaatgcctgcaaaggagctcctaaaacctgtaccttactagaaaagttccccgagacaacaggatgcagaagaggacag

SEQ ID NO: 660 - DNA, 134 bp, Homo sapiens
atcaaatattccatcatgcaccccgggactcacgtgtggccgcacacagggcccacaaactgcaggctccgaatgcacctgggcttggtgattcccaaggaaggctgcaagattcgatgtgccaacgagaccaa

SEQ ID NO: 661 - DNA, 2954 bp, Homo sapiens
gacctgggaggaaggcaaggtgctcatctttgatgactcctttgagcacgaggtatggcaggatgcctcatctttccggctgatattcatcgtggatgtgtggcatccggaactgacaccacagcagagacgcagccttccagcaatttagcatgaattcatgcaagcttgggaaactctggagagaggctgcctttctggttccatctccttgggtgtgaggatagaatttcgaacaccaagagtcaattcccttgacttgcagcccgagtaattcaaagcctcctcctagggtcagaagacactaaagggaatatttgcctcgctgcaattcatttaggaaacaccctgctgtgtgtcatctcatgacagcactggtcttctgccagtatttaaggtgaacatttgatagcttctaccttaccagccaaagatattttttccacatagaataggtctaattcaatgtataatgagaacatatgtagaaactgtgaatggattgctttagtttgtaatttttctatgcagttatatttttctagtgtagctagactattttgtcatcatgtaccactacatttttgtttattttaatgacaagctgtataaatgctttacttctagctatttaatggtagcattactggggaactcagacttccctcttttaattcttcttagtaaaagatactcatgaaaaaagcagttttattttcctaacaaaaaagaaagagctcattatgtcagtgtctatgaactgtacccatcccaactctcaaatcgtttggttttttttatcttgattgagatcctcttctcactatgctagtggtggagatattgacaaaatcctatttctttcaaagaggaacttttcacaccgaaaaaagagcatggaattattttatattgttataaaaatcccagatgcaaatttttttaatgccaattattagagcttctggggaaaaagtatagttcacggaaataaaactatgttctttcagggttgggtggataggtggctgctagggtgtctggctcctggcggctttgccatccatgaggcaagggctgggaacacagtgtctttgcctatggtagatccatgtgaatgtcaggaagccagctcttcagtcttggagatgatttctgctacaattctgtagaaagattaaggatggcagagtaaaaggttaccaagaatgccaggatgtttttcttgggcgtaggaggtccagattactttcctttttgatgaaagagtttggaagactgtcccatctctctggcttgagaaatctctgccattttaaacatcactgtgaaatagcaattattatcatctgtatttagttttaacattacccacaacatagaaataataggtaaaaatcgtcttgcctactcattccaaagatgatcaagtcattaatctagcaaagtattcatgtatcagattttgtatattttgaatcaaagctaactaggaatgttagatataagaatgtaatgatattcatgcactgaattctaagccaatatgaacaaaaatgctgcatgaatggcacatataggtcaccaaagttcattcacaggtagaaaaaacttgtgctttcttttccatctaaaaacaaaaggagactttctttatctcatttaaagaacagctctttgaaattgaaattgaccctttttgcttgaccttaaggagattagcttccagtagatgagtttgcaaaatacttttcctgttcttttgttttgctggtattgaaaacatcccactaaatcagatgaagaggcatgggaggaaaaatatccaaattaattactaaaatcgagaagagaaggcaaactcttgaaaagtaaaaaggtgtttgtgaccttcagtatttattgaacagaggaaataactgacaagggcaatacaattcaatgttcatgtagtaacattcatgtcacttgttgaatttggttctcatatgtatattgcatacacataaattcaaactataagtcgtcatttttgagccatcatcttacattcatgtaatgaaattatggaagagagtaaaaactagctcttaacttagtaaatataatatggtatttaaaatcaggtcactacagtaaggttctaagtattgccaattgaaaagctagaaatggtattactgttgcaaagtgttgtcaataattgactccaatagcattgtaaatacttgtatcccacaactattttaaacccaagcaataaaatggattttctaattcacttcaattctttatttctcttacctatctatgtcttggtacataagaaaagtgtttccatcactgcattggtagaattatttcagtgttattatttttgtgatttcgtatgtctacacaaaaatgaattagtttaatttatattgtgatacagttgtttgagaaatatttttaattctgtttcaactttatttctccaagtgtataatataaaaattacttctgttattgttctctaccaataggggaaaaaattaaaacattagatccattgagaaagagatgatgtaataaataattaagattagtaataatattatcaggggtgattatgaccagttgaataatctctttcccttgaattatttagctaacaaattaactctcccaaatatttaaaataatgtaaaatcatattttactgcccattattaactaaaatatttttgtttgactttgagcaccaactggtaatactaataaatacccatgtcatgcagatggctgggcgaataagagatgtctaaaaatatgcactggtcttggaaaacatggcacaagtaaggatatcatatatgatgtctgtttattttatgtctgatttcttttgaatgagtagttggggactccatttctaaggagactaggtaaataaaatgacctttgacatttca

SEQ ID NO: 662 - DNA, 5116 bp, Artificial Sequence
  Full mRNA polynucleotide sequence of ASPH
agtctcaagctctggtaggcaagtgcatgcagtgtgcctaaaacctgccagcagtacttttgagtttttttttttgttttgttttactttagcatttattattcatggattgaagaaatcaaaatggctgaagataaagagacaaagcatggaggacacaagaatgggaggaaaggcggactctcaggaacttcattcttcacgtggtttatggtgattgcattgctgggcgtctggacatctgtagctgtcgtttggtttgatcttgttgactatgaggaagttctaggaaaactaggaatctatgatgctgatggtgatggagattttgatgtggatgatgccaaagttttattaggacttaaagagagatctacttcagagccagcagtcccgccagaagaggctgagccacacactgagcccgaggagcaggttcctgtggaggcagaaccccagaatatcgaagatgaagcaaaagaacaaattcagtcccttctccatgaaatggtacacgcagaacatgttgagggagaagacttgcaacaagaagatggacccacaggagaaccacaacaagaggatgatgagtttcttatggcgactgatgtagatgatagatttgagaccctggaacctgaagtatctcatgaagaaaccgagcatagttaccacgtggaagagacagtttcacaagactgtaatcaggatatggaagagatgatgtctgagcaggaaaatccagattccagtgaaccagtagtagaagatgaaagattgcaccatgatacagatgatgtaacataccaagtctatgaggaacaagcagtatatgaacctctagaaaatgaagggatagaaatcacagaagtaactgctccccctgaggataatcctgtagaagattcacaggtaattgtagaagaagtaagcatttttcctgtggaagaacagcaggaagtaccaccagaaacaaatagaaaaacagatgatccagaacaaaaagcaaaagttaagaaaaagaagcctaaacttttaaataaatttgataagactattaaagctgaacttgatgctgcagaaaaactccgtaaaaggggaaaaattgaggaagcagtgaatgcatttaaagaactagtacgcaaataccctcagagtccacgagcaagatatgggaaggcgcagtgtgaggatgatttggctgagaagaggagaagtaatgaggtgctacgtggagccatcgagacctaccaagaggtggccagcctacctgatgtccctgcagacctgctgaagctgagtttgaagcgtcgctcagacaggcaacaatttctaggtcatatgagaggttccctgcttaccctgcagagattagttcaactatttcccaatgatacttccttaaaaaatgaccttggcgtgggatacctcttgataggagataatgacaatgcaaagaaagtttatgaagaggtgctgagtgtgacacctaatgatggctttgctaaagtccattatggcttcatcctgaaggcacagaacaaaattgctgagagcatcccatatttaaaggaaggaatagaatccggagatcctggcactgatgatgggagattttatttccacctgggggatgccatgcagagggttgggaacaaagaggcatataagtggtatgagcttgggcacaagagaggacactttgcatctgtctggcaacgctcactctacaatgtgaatggactgaaagcacagccttggtggaccccaaaagaaacgggctacacagagttagtaaagtctttagaaagaaactggaagttaatccgagatgaaggccttgcagtgatggataaagccaaaggtctcttcctgcctgaggatgaaaacctgagggaaaaaggggactggagccagttcacgctgtggcagcaaggaagaagaaatgaaaatgcctgcaaaggagctcctaaaacctgtaccttactagaaaagttccccgagacaacaggatgcagaagaggacagatcaaatattccatcatgcaccccgggactcacgtgtggccgcacacagggcccacaaactgcaggctccgaatgcacctgggcttggtgattcccaaggaaggctgcaagattcgatgtgccaacgagaccaagacctgggaggaaggcaaggtgctcatctttgatgactcctttgagcacgaggtatggcaggatgcctcatctttccggctgatattcatcgtggatgtgtggcatccggaactgacaccacagcagagacgcagccttccagcaatttagcatgaattcatgcaagcttgggaaactctggagagaggctgcctttctggttccatctccttgggtgtgaggatagaatttcgaacaccaagagtcaattcccttgacttgcagcccgagtaattcaaagcctcctcctagggtcagaagacactaaagggaatatttgcctcgctgcaattcatttaggaaacaccctgctgtgtgtcatctcatgacagcactggtcttctgccagtatttaaggtgaacatttgatagcttctaccttaccagccaaagatattttttccacatagaataggtctaattcaatgtataatgagaacatatgtagaaactgtgaatggattgctttagtttgtaatttttctatgcagttatatttttctagtgtagctagactattttgtcatcatgtaccactacatttttgtttattttaatgacaagctgtataaatgctttacttctagctatttaatggtagcattactggggaactcagacttccctcttttaattcttcttagtaaaagatactcatgaaaaaagcagttttattttcctaacaaaaaagaaagagctcattatgtcagtgtctatgaactgtacccatcccaactctcaaatcgtttggttttttttatcttgattgagatcctcttctcactatgctagtggtggagatattgacaaaatcctatttctttcaaagaggaacttttcacaccgaaaaaagagcatggaattattttatattgttataaaaatcccagatgcaaatttttttaatgccaattattagagcttctggggaaaaagtatagttcacggaaataaaactatgttctttcagggttgggtggataggtggctgctagggtgtctggctcctggcggctttgccatccatgaggcaagggctgggaacacagtgtctttgcctatggtagatccatgtgaatgtcaggaagccagctcttcagtcttggagatgatttctgctacaattctgtagaaagattaaggatggcagagtaaaaggttaccaagaatgccaggatgtttttcttgggcgtaggaggtccagattactttcctttttgatgaaagagtttggaagactgtcccatctctctggcttgagaaatctctgccattttaaacatcactgtgaaatagcaattattatcatctgtatttagttttaacattacccacaacatagaaataataggtaaaaatcgtcttgcctactcattccaaagatgatcaagtcattaatctagcaaagtattcatgtatcagattttgtatattttgaatcaaagctaactaggaatgttagatataagaatgtaatgatattcatgcactgaattctaagccaatatgaacaaaaatgctgcatgaatggcacatataggtcaccaaagttcattcacaggtagaaaaaacttgtgctttcttttccatctaaaaacaaaaggagactttctttatctcatttaaagaacagctctttgaaattgaaattgaccctttttgcttgaccttaaggagattagcttccagtagatgagtttgcaaaatacttttcctgttcttttgttttgctggtattgaaaacatcccactaaatcagatgaagaggcatgggaggaaaaatatccaaattaattactaaaatcgagaagagaaggcaaactcttgaaaagtaaaaaggtgtttgtgaccttcagtatttattgaacagaggaaataactgacaagggcaatacaattcaatgttcatgtagtaacattcatgtcacttgttgaatttggttctcatatgtatattgcatacacataaattcaaactataagtcgtcatttttgagccatcatcttacattcatgtaatgaaattatggaagagagtaaaaactagctcttaacttagtaaatataatatggtatttaaaatcaggtcactacagtaaggttctaagtattgccaattgaaaagctagaaatggtattactgttgcaaagtgttgtcaataattgactccaatagcattgtaaatacttgtatcccacaactattttaaacccaagcaataaaatggattttctaattcacttcaattctttatttctcttacctatctatgtcttggtacataagaaaagtgtttccatcactgcattggtagaattatttcagtgttattatttttgtgatttcgtatgtctacacaaaaatgaattagtttaatttatattgtgatacagttgtttgagaaatatttttaattctgtttcaactttatttctccaagtgtataatataaaaattacttctgttattgttctctaccaataggggaaaaaattaaaacattagatccattgagaaagagatgatgtaataaataattaagattagtaataatattatcaggggtgattatgaccagttgaataatctctttcccttgaattatttagctaacaaattaactctcccaaatatttaaaataatgtaaaatcatattttactgcccattattaactaaaatatttttgtttgactttgagcaccaactggtaatactaataaatacccatgtcatgcagatggctgggcgaataagagatgtctaaaaatatgcactggtcttggaaaacatggcacaagtaaggatatcatatatgatgtctgtttattttatgtctgatttcttttgaatgagtagttggggactccatttctaaggagactaggtaaataaaatgacctttgacatttca

SEQ ID NO: 663 - protein, 5 aa, Homo sapiens
MAEDK

SEQ ID NO: 664 - protein, 49 aa, Homo sapiens
TKHGGHKNGRKGGLSGTSFFTWFMVIALLGVWTSVAVVWFDLVDYEEVL

SEQ ID NO: 665 - protein, 22 aa, Homo sapiens
KLGIYDADGDGDFDVDDAKVLL

SEQ ID NO: 666 - protein, 30 aa, Homo sapiens
LKERSTSEPAVPPEEAEPHTEPEEQVPVEA

SEQ ID NO: 667 - protein, 24 aa, Homo sapiens
PQNIEDEAKEQIQSLLHEMVHAEH

SEQ ID NO: 668 - protein, 42 aa, Homo sapiens
EGEDLQQEDGPTGEPQQEDDEFLMATDVDDRFETLEPEVSHE

SEQ ID NO: 669 - protein, 10 aa, Homo sapiens
TEHSYHVEET

SEQ ID NO: 670 - protein, 18 aa, Homo sapiens
SQDCNQDMEEMMSEQENP

SEQ ID NO: 671 - protein, 15 aa, Homo sapiens
SSEPVVEDERLHHDT

SEQ ID NO: 672 - protein, 10 aa, Homo sapiens
DVTYQVYEEQ

SEQ ID NO: 673 - protein, 13 aa, Homo sapiens
VYEPLENEGIEIT

SEQ ID NO: 674 - protein, 18 aa, Homo sapiens
VTAPPEDNPVEDSQVIVE

SEQ ID NO: 675 - protein, 14 aa, Homo sapiens
VSIFPVEEQQEVPP

SEQ ID NO: 676 - protein, 13 aa, Homo sapiens
TNRKTDDPEQKAK

SEQ ID NO: 677 - protein, 28 aa, Homo sapiens
KKKKPKLLNKFDKTIKAELDAAEKLRKR

SEQ ID NO: 678 - protein, 29 aa, Homo sapiens
GKIEEAVNAFKELVRKYPQSPRARYGKAQ

SEQ ID NO: 679 - protein, 50 aa, Homo sapiens
CEDDLAEKRRSNEVLRGAIETYQEVASLPDVPADLLKLSLKRRSDRQQFL

SEQ ID NO: 680 - protein, 45 aa, Homo sapiens
HMRGSLLTLQRLVQLFPNDTSLKNDLGVGYLLIGDNDNAKKVYEE

SEQ ID NO: 681 - protein, 33 aa, Homo sapiens
VLSVTPNDGFAKVHYGFILKAQNKIAESIPYLK

SEQ ID NO: 682 - protein, 30 aa, Homo sapiens
EGIESGDPGTDDGRFYFHLGDAMQRVGNKE

SEQ ID NO: 683 - protein, 46 aa, Homo sapiens
AYKWYELGHKRGHFASVWQRSLYNVNGLKAQPWWTPKETGYTELVK

SEQ ID NO: 684 - protein, 45 aa, Homo sapiens
SLERNWKLIRDEGLAVMDKAKGLFLPEDENLREKGDWSQFTLWQQ

SEQ ID NO: 685 - protein, 30 aa, Homo sapiens
RRNENACKGAPKTCTLLEKFPETTGCRRGQ

SEQ ID NO: 686 - protein, 44 aa, Homo sapiens
IKYSIMHPGTHVWPHTGPTNCRLRMHLGLVIPKEGCKIRCANET

SEQ ID NO: 687 - protein, 49 aa, Homo sapiens
TWEEGKVLIFDDSFEHEVWQDASSFRLIFIVDVWHPELTPQQRRSLPAI

SEQ ID NO: 688 - protein, 729 aa, Homo sapiens
MAEDKETKHGGHKNGRKGGLSGTSFFTWFMVIALLGVWTSVAVVWFDLVDYEEVLGKLGIYDADGDGDFDVDDAKVLLGLKERSTSEPAVPPEEAEPHTEPEEQVPVEAEPQNIEDEAKEQIQSLLHEMVHAEHVEGEDLQQEDGPTGEPQQEDDEFLMATDVDDRFETLEPEVSHEETEHSYHVEETVSQDCNQDMEEMMSEQENPDSSEPVVEDERLHHDTDDVTYQVYEEQAVYEPLENEGIEITEVTAPPEDNPVEDSQVIVEEVSIFPVEEQQEVPPETNRKTDDPEQKAKVKKKKPKLLNKFDKTIKAELDAAEKLRKRGKIEEAVNAFKELVRKYPQSPRARYGKAQCEDDLAEKRRSNEVLRGAIETYQEVASLPDVPADLLKLSLKRRSDRQQFLGHMRGSLLTLQRLVQLFPNDTSLKNDLGVGYLLIGDNDNAKKVYEEVLSVTPNDGFAKVHYGFILKAQNKIAESIPYLKEGIESGDPGTDDGRFYFHLGDAMQRVGNKEAYKWYELGHKRGHFASVWQRSLYNVNGLKAQPWWTPKETGYTELVKSLERNWKLIRDEGLAVMDKAKGLFLPEDENLREKGDWSQFTLWQQGRRNENACKGAPKTCTLLEKFPETTGCRRGQIKYSIMHPGTHVWPHTGPTNCRLRMHLGLVIPKEGCKIRCANETKTWEEGKVLIFDDSFEHEVWQDASSFRLIFIVDVWHPELTPQQRRSLPAI

SEQ ID NO: 689 - DNA, 1936 bp, Homo sapiens
agtctcaagctctggtaggcaagtgcatgcagtgtgcctaaaacctgccagcagtacttttgagtttttttttttgttttgttttactttagcatttattattcatggattgaagaaatcaaaatggctgaagataaagagacaaagcatggaggacacaagaatgggaggaaaggcggactctcaggaacttcattcttcacgtggtttatggtgattgcattgctgggcgtctggacatctgtagctgtcgtttggtttgatcttgttgactatgaggaagttctaggaaaactaggaatctatgatgctgatggtgatggagattttgatgtggatgatgccaaagttttattaggacttaaagagagatctacttcagagccagcagtcccgccagaagaggctgagccacacactgagcccgaggagcaggttcctgtggaggcagaaccccagaatatcgaagatgaagcaaaagaacaaattcagtcccttctccatgaaatggtacacgcagaacatgttgagggagaagacttgcaacaagaagatggacccacaggagaaccacaacaagaggatgatgagtttcttatggcgactgatgtagatgatagatttgagaccctggaacctgaagtatctcatgaagaaaccgagcatagttaccacgtggaagagacagtttcacaagactgtaatcaggatatggaagagatgatgtctgagcaggaaaatccagattccagtgaaccagtagtagaagatgaaagattgcaccatgatacagatgatgtaacataccaagtctatgaggaacaagcagtatatgaacctctagaaaatgaagggatagaaatcacagaagtaactgctccccctgaggataatcctgtagaagattcacaggtaattgtagaagaagtaagcatttttcctgtggaagaacagcaggaagtaccaccagaaacaaatagaaaaacagatgatccagaacaaaaagcaaaagttaagaaaaagaagcctaaacttttaaataaatttgataagactattaaagctgaacttgatgctgcagaaaaactccgtaaaaggggaaaaattgaggaagcagtgaatgcatttaaagaactagtacgcaaataccctcagagtccacgagcaagatatgggaaggcgcagtgtgaggatgatttggctgagaagaggagaagtaatgaggtgctacgtggagccatcgagacctaccaagaggtggccagcctacctgatgtccctgcagacctgctgaagctgagtttgaagcgtcgctcagacaggcaacaatttctaggtcatatgagaggttccctgcttaccctgcagagattagttcaactatttcccaatgatacttccttaaaaaatgaccttggcgtgggatacctcttgataggagataatgacaatgcaaagaaagtttatgaagaggtgctgagtgtgacacctaatgatggctttgctaaagtccattatggcttcatcctgaaggcacagaacaaaattgctgagagcatcccatatttaaaggaaggaatagaatccggagatcctggcactgatgatgggagattttatttccacctgggggatgccatgcagagggttgggaacaaagaggcatataagtggtatgagcttgggcacaagagaggacactttgcatctgtctggcaacgctcactctacaatgtgaatggactgaaagcacagccttggtggaccccaaaagaaacgggctacacagagttagtaaagtctttagaaagaaactggaagttaatccgagatgaaggccttgcagtgatggataaagccaaaggtctcttcctgcctgaggatgaaaacctgagggaaaaaggggactggagccagttcacgctgtggcagcaag

SEQ ID NO: 690 - protein, 604 aa, Homo sapiens
MAEDKETKHGGHKNGRKGGLSGTSFFTWFMVIALLGVWTSVAVVWFDLVDYEEVLGKLGIYDADGDGDFDVDDAKVLLGLKERSTSEPAVPPEEAEPHTEPEEQVPVEAEPQNIEDEAKEQIQSLLHEMVHAEHVEGEDLQQEDGPTGEPQQEDDEFLMATDVDDRFETLEPEVSHEETEHSYHVEETVSQDCNQDMEEMMSEQENPDSSEPVVEDERLHHDTDDVTYQVYEEQAVYEPLENEGIEITEVTAPPEDNPVEDSQVIVEEVSIFPVEEQQEVPPETNRKTDDPEQKAKVKKKKPKLLNKFDKTIKAELDAAEKLRKRGKIEEAVNAFKELVRKYPQSPRARYGKAQCEDDLAEKRRSNEVLRGAIETYQEVASLPDVPADLLKLSLKRRSDRQQFLGHMRGSLLTLQRLVQLFPNDTSLKNDLGVGYLLIGDNDNAKKVYEEVLSVTPNDGFAKVHYGFILKAQNKIAESIPYLKEGIESGDPGTDDGRFYFHLGDAMQRVGNKEAYKWYELGHKRGHFASVWQRSLYNVNGLKAQPWWTPKETGYTELVKSLERNWKLIRDEGLAVMDKAKGLFLPEDENLREKGDWSQFTLWQQ

SEQ ID NO: 691 - DNA, 75 bp, Homo sapiens
cctcctgtactccaggctccacctgcatcgaccgtgtggcctccttctcttgcatgtgcccagaggggaaggcag

SEQ ID NO: 692 - DNA, 75 bp, Homo sapiens
ctacatctacatccaccactgggacaagccatcttgtaaaatgtgcggagaaggagaaaactttctgtgtgaatg

SEQ ID NO: 693 - DNA, 150 bp, Homo sapiens
cctcctgtactccaggctccacctgcatcgaccgtgtggcctccttctcttgcatgtgcccagaggggaaggcagctacatctacatccaccactgggacaagccatcttgtaaaatgtgcggagaaggagaaaactttctgtgtgaatg

SEQ ID NO: 694 - protein, 49 aa, Homo sapiens
SCTPGSTCIDRVASFSCMCPEGKAATSTSTTGTSHLVKCAEKEKTFCVN

SEQ ID NO: 695 - DNA, 329 bp, Homo sapiens
aggctgcttcgttgcacacccgagaaagtttcagccaaacttcgggcggcggctgaggcggcggccgaggagcggcggactcggggcgcggggagtcgaggcatttgcgcctgggcttcggagcgtagcgccagggcctgagcctttgaagcaggaggaggggaggagagagtggggctcctctatcgggaccccctccccatgtggatctgcccaggcggcggcggcggcggcggaggaggaggcgaccgagaagatgcccgccctgcgccccgctctgctgtgggcgctgctggcgctctggctgtgctgcgcggcccccgcgcatg

SEQ ID NO: 696 - DNA, 82 bp, Homo sapiens
cattgcagtgtcgagatggctatgaaccctgtgtaaatgaaggaatgtgtgttacctaccacaatggcacaggatactgcaa

SEQ ID NO: 697 - DNA, 260 bp, Homo sapiens
atgtccagaaggcttcttgggggaatattgtcaacatcgagacccctgtgagaagaaccgctgccagaatggtgggacttgtgtggcccaggccatgctggggaaagccacgtgccgatgtgcctcagggtttacaggagaggactgccagtactcaacatctcatccatgctttgtgtctcgaccctgcctgaatggcggcacatgccatatgctcagccgggatacctatgagtgcacctgtcaagtcgggtttacag

SEQ ID NO: 698 - DNA, 336 bp, Homo sapiens
gtaaggagtgccaatggacggatgcctgcctgtctcatccctgtgcaaatggaagtacctgtaccactgtggccaaccagttctcctgcaaatgcctcacaggcttcacagggcagaaatgtgagactgatgtcaatgagtgtgacattccaggacactgccagcatggtggcacctgcctcaacctgcctggttcctaccagtgccagtgccctcagggcttcacaggccagtactgtgacagcctgtatgtgccctgtgcaccctcaccttgtgtcaatggaggcacctgtcggcagactggtgacttcacttttgagtgcaactgccttccag

SEQ ID NO: 699 - DNA, 123 bp, Homo sapiens
gttttgaagggagcacctgtgagaggaatattgatgactgccctaaccacaggtgtcagaatggaggggtttgtgtggatggggtcaacacttacaactgccgctgtcccccacaatggacag

SEQ ID NO: 700 - DNA, 234 bp, Homo sapiens
gacagttctgcacagaggatgtggatgaatgcctgctgcagcccaatgcctgtcaaaatgggggcacctgtgccaaccgcaatggaggctatggctgtgtatgtgtcaacggctggagtggagatgactgcagtgagaacattgatgattgtgccttcgcctcctgtactccaggctccacctgcatcgaccgtgtggcctccttctcttgcatgtgcccagaggggaaggcag

SEQ ID NO: 701 - DNA, 156 bp, Homo sapiens
gtctcctgtgtcatctggatgatgcatgcatcagcaatccttgccacaagggggcactgtgtgacaccaaccccctaaatgggcaatatatttgcacctgcccacaaggctacaaaggggctgactgcacagaagatgtggatgaatgtgccatgg

SEQ ID NO: 702 - DNA, 9905 bp, Homo sapiens
ccaatagcaatccttgtgagcatgcaggaaaatgtgtgaacacggatggcgccttccactgtgagtgtctgaagggttatgcaggacctcgttgtgagatggacatcaatgagtgccattcagacccctgccagaatgatgctacctgtctggataagattggaggcttcacatgtctgtgcatgccaggtttcaaaggtgtgcattgtgaattagaaataaatgaatgtcagagcaacccttgtgtgaacaatgggcagtgtgtggataaagtcaatcgtttccagtgcctgtgtcctcctggtttcactgggccagtttgccagattgatattgatgactgttccagtactccgtgtctgaatggggcaaagtgtatcgatcacccgaatggctatgaatgccagtgtgccacaggtttcactggtgtgttgtgtgaggagaacattgacaactgtgaccccgatccttgccaccatggtcagtgtcaggatggtattgattcctacacctgcatctgcaatcccgggtacatgggcgccatctgcagtgaccagattgatgaatgttacagcagcccttgcctgaacgatggtcgctgcattgacctggtcaatggctaccagtgcaactgccagccaggcacgtcaggggttaattgtgaaattaattttgatgactgtgcaagtaacccttgtatccatggaatctgtatggatggcattaatcgctacagttgtgtctgctcaccaggattcacagggcagagatgtaacattgacattgatgagtgtgcctccaatccctgtcgcaagggtgcaacatgtatcaacggtgtgaatggtttccgctgtatatgccccgagggaccccatcaccccagctgctactcacaggtgaacgaatgcctgagcaatccctgcatccatggaaactgtactggaggtctcagtggatataagtgtctctgtgatgcaggctgggttggcatcaactgtgaagtggacaaaaatgaatgcctttcgaatccatgccagaatggaggaacttgtgacaatctggtgaatggatacaggtgtacttgcaagaagggctttaaaggctataactgccaggtgaatattgatgaatgtgcctcaaatccatgcctgaaccaaggaacctgctttgatgacataagtggctacacttgccactgtgtgctgccatacacaggcaagaattgtcagacagtattggctccctgttccccaaacccttgtgagaatgctgctgtttgcaaagagtcaccaaattttgagagttatacttgcttgtgtgctcctggctggcaaggtcagcggtgtaccattgacattgacgagtgtatctccaagccctgcatgaaccatggtctctgccataacacccagggcagctacatgtgtgaatgtccaccaggcttcagtggtatggactgtgaggaggacattgatgactgccttgccaatccttgccagaatggaggttcctgtatggatggagtgaatactttctcctgcctctgccttccgggtttcactggggataagtgccagacagacatgaatgagtgtctgagtgaaccctgtaagaatggagggacctgctctgactacgtcaacagttacacttgcaagtgccaggcaggatttgatggagtccattgtgagaacaacatcaatgagtgcactgagagctcctgtttcaatggtggcacatgtgttgatgggattaactccttctcttgcttgtgccctgtgggtttcactggatccttctgcctccatgagatcaatgaatgcagctctcatccatgcctgaatgagggaacgtgtgttgatggcctgggtacctaccgctgcagctgccccctgggctacactgggaaaaactgtcagaccctggtgaatctctgcagtcggtctccatgtaaaaacaaaggtacttgcgttcagaaaaaagcagagtcccagtgcctatgtccatctggatgggctggtgcctattgtgacgtgcccaatgtctcttgtgacatagcagcctccaggagaggtgtgcttgttgaacacttgtgccagcactcaggtgtctgcatcaatgctggcaacacgcattactgtcagtgccccctgggctatactgggagctactgtgaggagcaactcgatgagtgtgcgtccaacccctgccagcacggggcaacatgcagtgacttcattggtggatacagatgcgagtgtgtcccaggctatcagggtgtcaactgtgagtatgaagtggatgagtgccagaatcagccctgccagaatggaggcacctgtattgaccttgtgaaccatttcaagtgctcttgcccaccaggcactcggggcctactctgtgaagagaacattgatgactgtgcccggggtccccattgccttaatggtggtcagtgcatggataggattggaggctacagttgtcgctgcttgcctggctttgctggggagcgttgtgagggagacatcaacgagtgcctctccaacccctgcagctctgagggcagcctggactgtatacagctcaccaatgactacctgtgtgtttgccgtagtgcctttactggccggcactgtgaaaccttcgtcgatgtgtgtccccagatgccctgcctgaatggagggacttgtgctgtggccagtaacatgcctgatggtttcatttgccgttgtcccccgggattttccggggcaaggtgccagagcagctgtggacaagtgaaatgtaggaagggggagcagtgtgtgcacaccgcctctggaccccgctgcttctgccccagtccccgggactgcgagtcaggctgtgccagtagcccctgccagcacgggggcagctgccaccctcagcgccagcctccttattactcctgccagtgtgccccaccattctcgggtagccgctgtgaactctacacggcaccccccagcacccctcctgccacctgtctgagccagtattgtgccgacaaagctcgggatggcgtctgtgatgaggcctgcaacagccatgcctgccagtgggatgggggtgactgttctctcaccatggagaacccctgggccaactgctcctccccacttccctgctgggattatatcaacaaccagtgtgatgagctgtgcaacacggtcgagtgcctgtttgacaactttgaatgccaggggaacagcaagacatgcaagtatgacaaatactgtgcagaccacttcaaagacaaccactgtgaccaggggtgcaacagtgaggagtgtggttgggatgggctggactgtgctgctgaccaacctgagaacctggcagaaggtaccctggttattgtggtattgatgccacctgaacaactgctccaggatgctcgcagcttcttgcgggcactgggtaccctgctccacaccaacctgcgcattaagcgggactcccagggggaactcatggtgtacccctattatggtgagaagtcagctgctatgaagaaacagaggatgacacgcagatcccttcctggtgaacaagaacaggaggtggctggctctaaagtctttctggaaattgacaaccgccagtgtgttcaagactcagaccactgcttcaagaacacggatgcagcagcagctctcctggcctctcacgccatacaggggaccctgtcataccctcttgtgtctgtcgtcagtgaatccctgactccagaacgcactcagctcctctatctccttgctgttgctgttgtcatcattctgtttattattctgctgggggtaatcatggcaaaacgaaagcgtaagcatggctctctctggctgcctgaaggtttcactcttcgccgagatgcaagcaatcacaagcgtcgtgagccagtgggacaggatgctgtggggctgaaaaatctctcagtgcaagtctcagaagctaacctaattggtactggaacaagtgaacactgggtcgatgatgaagggccccagccaaagaaagtaaaggctgaagatgaggccttactctcagaagaagatgaccccattgatcgacggccatggacacagcagcaccttgaagctgcagacatccgtaggacaccatcgctggctctcacccctcctcaggcagagcaggaggtggatgtgttagatgtgaatgtccgtggcccagatggctgcaccccattgatgttggcttctctccgaggaggcagctcagatttgagtgatgaagatgaagatgcagaggactcttctgctaacatcatcacagacttggtctaccagggtgccagcctccaggcccagacagaccggactggtgagatggccctgcaccttgcagcccgctactcacgggctgatgctgccaagcgtctcctggatgcaggtgcagatgccaatgcccaggacaacatgggccgctgtccactccatgctgcagtggcagctgatgcccaaggtgtcttccagattctgattcgcaaccgagtaactgatctagatgccaggatgaatgatggtactacacccctgatcctggctgcccgcctggctgtggagggaatggtggcagaactgatcaactgccaagcggatgtgaatgcagtggatgaccatggaaaatctgctcttcactgggcagctgctgtcaataatgtggaggcaactcttttgttgttgaaaaatggggccaaccgagacatgcaggacaacaaggaagagacacctctgtttcttgctgcccgggaggggagctatgaagcagccaagatcctgttagaccattttgccaatcgagacatcacagaccatatggatcgtcttccccgggatgtggctcgggatcgcatgcaccatgacattgtgcgccttctggatgaatacaatgtgaccccaagccctccaggcaccgtgttgacttctgctctctcacctgtcatctgtgggcccaacagatctttcctcagcctgaagcacaccccaatgggcaagaagtctagacggcccagtgccaagagtaccatgcctactagcctccctaaccttgccaaggaggcaaaggatgccaagggtagtaggaggaagaagtctctgagtgagaaggtccaactgtctgagagttcagtaactttatcccctgttgattccctagaatctcctcacacgtatgtttccgacaccacatcctctccaatgattacatcccctgggatcttacaggcctcacccaaccctatgttggccactgccgcccctcctgccccagtccatgcccagcatgcactatctttttctaaccttcatgaaatgcagcctttggcacatggggccagcactgtgcttccctcagtgagccagttgctatcccaccaccacattgtgtctccaggcagtggcagtgctggaagcttgagtaggctccatccagtcccagtcccagcagattggatgaaccgcatggaggtgaatgagacccagtacaatgagatgtttggtatggtcctggctccagctgagggcacccatcctggcatagctccccagagcaggccacctgaagggaagcacataaccacccctcgggagcccttgccccccattgtgactttccagctcatccctaaaggcagtattgcccaaccagcgggggctccccagcctcagtccacctgccctccagctgttgcgggccccctgcccaccatgtaccagattccagaaatggcccgtttgcccagtgtggctttccccactgccatgatgccccagcaggacgggcaggtagctcagaccattctcccagcctatcatcctttcccagcctctgtgggcaagtaccccacacccccttcacagcacagttatgcttcctcaaatgctgctgagcgaacacccagtcacagtggtcacctccagggtgagcatccctacctgacaccatccccagagtctcctgaccagtggtcaagttcatcaccccactctgcttctgactggtcagatgtgaccaccagccctacccctgggggtgctggaggaggtcagcggggacctgggacacacatgtctgagccaccacacaacaacatgcaggtttatgcgtgagagagtccacctccagtgtagagacataactgacttttgtaaatgctgctgaggaacaaatgaaggtcatccgggagagaaatgaagaaatctctggagccagcttctagaggtaggaaagagaagatgttcttattcagataatgcaagagaagcaattcgtcagtttcactgggtatctgcaaggcttattgattattctaatctaataagacaagtttgtggaaatgcaagatgaatacaagccttgggtccatgtttactctcttctatttggagaataagatggatgcttattgaagcccagacattcttgcagcttggactgcattttaagccctgcaggcttctgccatatccatgagaagattctacactagcgtcctgttgggaattatgccctggaattctgcctgaattgacctacgcatctcctcctccttggacattcttttgtcttcatttggtgcttttggttttgcacctctccgtgattgtagccctaccagcatgttatagggcaagacctttgtgcttttgatcattctggcccatgaaagcaactttggtctcctttcccctcctgtcttcccggtatcccttggagtctcacaaggtttactttggtatggttctcagcacaaacctttcaagtatgttgtttctttggaaaatggacatactgtattgtgttctcctgcatatatcattcctggagagagaaggggagaagaatacttttcttcaacaaattttgggggcaggagatcccttcaagaggctgcaccttaatttttcttgtctgtgtgcaggtcttcatataaactttaccaggaagaagggtgtgagtttgttgtttttctgtgtatgggcctggtcagtgtaaagttttatccttgatagtctagttactatgaccctccccacttttttaaaaccagaaaaaggtttggaatgttggaatgaccaagagacaagttaactcgtgcaagagccagttacccacccacaggtccccctacttcctgccaagcattccattgactgcctgtatggaacacatttgtcccagatctgagcattctaggcctgtttcactcactcacccagcatatgaaactagtcttaactgttgagcctttcctttcatatccacagaagacactgtctcaaatgttgtacccttgccatttaggactgaactttccttagcccaagggacccagtgacagttgtcttccgtttgtcagatgatcagtctctactgattatcttgctgcttaaaggcctgctcaccaatctttctttcacaccgtgtggtccgtgttactggtatacccagtatgttctcactgaagacatggactttatatgttcaagtgcaggaattggaaagttggacttgttttctatgatccaaaacagccctataagaaggttggaaaaggaggaactatatagcagcctttgctattttctgctaccatttcttttcctctgaagcggccatgacattccctttggcaactaacgtagaaactcaacagaacattttcctttcctagagtcaccttttagatgataatggacaactatagacttgctcattgttcagactgattgcccctcacctgaatccactctctgtattcatgctcttggcaatttctttgactttcttttaagggcagaagcattttagttaattgtagataaagaatagttttcttcctcttctccttgggccagttaataattggtccatggctacactgcaacttccgtccagtgctgtgatgcccatgacacctgcaaaataagttctgcctgggcattttgtagatattaacaggtgaattcccgactcttttggtttgaatgacagttctcattccttctatggctgcaagtatgcatcagtgcttcccacttacctgatttgtctgtcggtggccccatatggaaaccctgcgtgtctgttggcataatagtttacaaatggttttttcagtcctatccaaatttattgaaccaacaaaaataattacttctgccctgagataagcagattaagtttgttcattctctgctttattctctccatgtggcaacattctgtcagcctctttcatagtgtgcaaacattttatcattctaaatggtgactctctgcccttggacccatttattattcacagatggggagaacctatctgcatggacctctgtggaccacagcgtacctgcccctttctgccctcctgctccagccccacttctgaaagtatcagctactgatccagccactggatattttatatcctcccttttccttaagcacaatgtcagaccaaattgcttgtttctttttcttggactactttaatttggatcctttgggtttggagaaagggaatgtgaaagctgtcattacagacaacaggtttcagtgatgaggaggacaacactgcctttcaaactttttactgatctcttagattttaagaactcttgaattgtgtggtatctaataaaagggaaggtaagatggataatcactttctcatttgggttctgaattggagactcagtttttatgagacacatcttttatgccatgtatagatcctcccctgctatttttggtttatttttattgttataaatgctttctttctttgactcctcttctgcctgcctttggggataggtttttttgtttgtttatttgcttcctctgttttgttttaagcatcattttcttatgtgaggtggggaagggaaaggtatgagggaaagagagtctgagaattaaaatattttagtataagcaattggctgtgatgctcaaatccattgcatcctcttattgaatttgccaatttgtaatttttgcataataaagaaccaaaggtgtaatgttttgttgagaggtggtttagggattttggccctaaccaatacattgaatgtatgatgactatttgggaggacacatttatgtacccagaggcccccactaataagtggtactatggttacttccttgtgtacatttctcttaaaagtgatattatatctgtttgtatgagaaacccagtaaccaataaaatgaccgcatattcctgactaaacgtagtaaggaaaatgcacactttgtttttacttttccgtttcattctaaaggtagttaagatgaaatttatatgaaagcatttttatcacaaaataaaaaaggtttgccaagctcagtggtgttgtattttttattttccaatactgcatccatggcctggcagtgttacctcatgatgtcataatttgctgagagagcaaattttcttttctttctgaatcccacaaagcctagcaccaaacttctttttttcttcctttaattagatcataaataaatgatcctggggaaaaagcatctgtcaaataggaaacatcacaaaactgagcactcttctgtgcactagccatagctggtgacaaacagatggttgctcagggacaaggtgccttccaatggaaatgcgaagtagttgctatagcaagaattgggaactgggatataagtcataatattaattatgctgttatgtaaatgattggtttgtaacattccttaagtgaaatttgtgtagaacttaatatacaggattataaaataatattttgtgtataaatttgttataagttcacattcatacatttatttataaagtcagtgagatatttgaacatgaa

SEQ ID NO: 703 - DNA, 11425 bp, Artificial Sequence
  Full mRNA polynucleotide sequence of NOTCH2
aggctgcttcgttgcacacccgagaaagtttcagccaaacttcgggcggcggctgaggcggcggccgaggagcggcggactcggggcgcggggagtcgaggcatttgcgcctgggcttcggagcgtagcgccagggcctgagcctttgaagcaggaggaggggaggagagagtggggctcctctatcgggaccccctccccatgtggatctgcccaggcggcggcggcggcggcggaggaggaggcgaccgagaagatgcccgccctgcgccccgctctgctgtgggcgctgctggcgctctggctgtgctgcgcggcccccgcgcatgcattgcagtgtcgagatggctatgaaccctgtgtaaatgaaggaatgtgtgttacctaccacaatggcacaggatactgcaaatgtccagaaggcttcttgggggaatattgtcaacatcgagacccctgtgagaagaaccgctgccagaatggtgggacttgtgtggcccaggccatgctggggaaagccacgtgccgatgtgcctcagggtttacaggagaggactgccagtactcaacatctcatccatgctttgtgtctcgaccctgcctgaatggcggcacatgccatatgctcagccgggatacctatgagtgcacctgtcaagtcgggtttacaggtaaggagtgccaatggacggatgcctgcctgtctcatccctgtgcaaatggaagtacctgtaccactgtggccaaccagttctcctgcaaatgcctcacaggcttcacagggcagaaatgtgagactgatgtcaatgagtgtgacattccaggacactgccagcatggtggcacctgcctcaacctgcctggttcctaccagtgccagtgccctcagggcttcacaggccagtactgtgacagcctgtatgtgccctgtgcaccctcaccttgtgtcaatggaggcacctgtcggcagactggtgacttcacttttgagtgcaactgccttccaggttttgaagggagcacctgtgagaggaatattgatgactgccctaaccacaggtgtcagaatggaggggtttgtgtggatggggtcaacacttacaactgccgctgtcccccacaatggacaggacagttctgcacagaggatgtggatgaatgcctgctgcagcccaatgcctgtcaaaatgggggcacctgtgccaaccgcaatggaggctatggctgtgtatgtgtcaacggctggagtggagatgactgcagtgagaacattgatgattgtgccttcgcctcctgtactccaggctccacctgcatcgaccgtgtggcctccttctcttgcatgtgcccagaggggaaggcaggtctcctgtgtcatctggatgatgcatgcatcagcaatccttgccacaagggggcactgtgtgacaccaaccccctaaatgggcaatatatttgcacctgcccacaaggctacaaaggggctgactgcacagaagatgtggatgaatgtgccatggccaatagcaatccttgtgagcatgcaggaaaatgtgtgaacacggatggcgccttccactgtgagtgtctgaagggttatgcaggacctcgttgtgagatggacatcaatgagtgccattcagacccctgccagaatgatgctacctgtctggataagattggaggcttcacatgtctgtgcatgccaggtttcaaaggtgtgcattgtgaattagaaataaatgaatgtcagagcaacccttgtgtgaacaatgggcagtgtgtggataaagtcaatcgtttccagtgcctgtgtcctcctggtttcactgggccagtttgccagattgatattgatgactgttccagtactccgtgtctgaatggggcaaagtgtatcgatcacccgaatggctatgaatgccagtgtgccacaggtttcactggtgtgttgtgtgaggagaacattgacaactgtgaccccgatccttgccaccatggtcagtgtcaggatggtattgattcctacacctgcatctgcaatcccgggtacatgggcgccatctgcagtgaccagattgatgaatgttacagcagcccttgcctgaacgatggtcgctgcattgacctggtcaatggctaccagtgcaactgccagccaggcacgtcaggggttaattgtgaaattaattttgatgactgtgcaagtaacccttgtatccatggaatctgtatggatggcattaatcgctacagttgtgtctgctcaccaggattcacagggcagagatgtaacattgacattgatgagtgtgcctccaatccctgtcgcaagggtgcaacatgtatcaacggtgtgaatggtttccgctgtatatgccccgagggaccccatcaccccagctgctactcacaggtgaacgaatgcctgagcaatccctgcatccatggaaactgtactggaggtctcagtggatataagtgtctctgtgatgcaggctgggttggcatcaactgtgaagtggacaaaaatgaatgcctttcgaatccatgccagaatggaggaacttgtgacaatctggtgaatggatacaggtgtacttgcaagaagggctttaaaggctataactgccaggtgaatattgatgaatgtgcctcaaatccatgcctgaaccaaggaacctgctttgatgacataagtggctacacttgccactgtgtgctgccatacacaggcaagaattgtcagacagtattggctccctgttccccaaacccttgtgagaatgctgctgtttgcaaagagtcaccaaattttgagagttatacttgcttgtgtgctcctggctggcaaggtcagcggtgtaccattgacattgacgagtgtatctccaagccctgcatgaaccatggtctctgccataacacccagggcagctacatgtgtgaatgtccaccaggcttcagtggtatggactgtgaggaggacattgatgactgccttgccaatccttgccagaatggaggttcctgtatggatggagtgaatactttctcctgcctctgccttccgggtttcactggggataagtgccagacagacatgaatgagtgtctgagtgaaccctgtaagaatggagggacctgctctgactacgtcaacagttacacttgcaagtgccaggcaggatttgatggagtccattgtgagaacaacatcaatgagtgcactgagagctcctgtttcaatggtggcacatgtgttgatgggattaactccttctcttgcttgtgccctgtgggtttcactggatccttctgcctccatgagatcaatgaatgcagctctcatccatgcctgaatgagggaacgtgtgttgatggcctgggtacctaccgctgcagctgccccctgggctacactgggaaaaactgtcagaccctggtgaatctctgcagtcggtctccatgtaaaaacaaaggtacttgcgttcagaaaaaagcagagtcccagtgcctatgtccatctggatgggctggtgcctattgtgacgtgcccaatgtctcttgtgacatagcagcctccaggagaggtgtgcttgttgaacacttgtgccagcactcaggtgtctgcatcaatgctggcaacacgcattactgtcagtgccccctgggctatactgggagctactgtgaggagcaactcgatgagtgtgcgtccaacccctgccagcacggggcaacatgcagtgacttcattggtggatacagatgcgagtgtgtcccaggctatcagggtgtcaactgtgagtatgaagtggatgagtgccagaatcagccctgccagaatggaggcacctgtattgaccttgtgaaccatttcaagtgctcttgcccaccaggcactcggggcctactctgtgaagagaacattgatgactgtgcccggggtccccattgccttaatggtggtcagtgcatggataggattggaggctacagttgtcgctgcttgcctggctttgctggggagcgttgtgagggagacatcaacgagtgcctctccaacccctgcagctctgagggcagcctggactgtatacagctcaccaatgactacctgtgtgtttgccgtagtgcctttactggccggcactgtgaaaccttcgtcgatgtgtgtccccagatgccctgcctgaatggagggacttgtgctgtggccagtaacatgcctgatggtttcatttgccgttgtcccccgggattttccggggcaaggtgccagagcagctgtggacaagtgaaatgtaggaagggggagcagtgtgtgcacaccgcctctggaccccgctgcttctgccccagtccccgggactgcgagtcaggctgtgccagtagcccctgccagcacgggggcagctgccaccctcagcgccagcctccttattactcctgccagtgtgccccaccattctcgggtagccgctgtgaactctacacggcaccccccagcacccctcctgccacctgtctgagccagtattgtgccgacaaagctcgggatggcgtctgtgatgaggcctgcaacagccatgcctgccagtgggatgggggtgactgttctctcaccatggagaacccctgggccaactgctcctccccacttccctgctgggattatatcaacaaccagtgtgatgagctgtgcaacacggtcgagtgcctgtttgacaactttgaatgccaggggaacagcaagacatgcaagtatgacaaatactgtgcagaccacttcaaagacaaccactgtgaccaggggtgcaacagtgaggagtgtggttgggatgggctggactgtgctgctgaccaacctgagaacctggcagaaggtaccctggttattgtggtattgatgccacctgaacaactgctccaggatgctcgcagcttcttgcgggcactgggtaccctgctccacaccaacctgcgcattaagcgggactcccagggggaactcatggtgtacccctattatggtgagaagtcagctgctatgaagaaacagaggatgacacgcagatcccttcctggtgaacaagaacaggaggtggctggctctaaagtctttctggaaattgacaaccgccagtgtgttcaagactcagaccactgcttcaagaacacggatgcagcagcagctctcctggcctctcacgccatacaggggaccctgtcataccctcttgtgtctgtcgtcagtgaatccctgactccagaacgcactcagctcctctatctccttgctgttgctgttgtcatcattctgtttattattctgctgggggtaatcatggcaaaacgaaagcgtaagcatggctctctctggctgcctgaaggtttcactcttcgccgagatgcaagcaatcacaagcgtcgtgagccagtgggacaggatgctgtggggctgaaaaatctctcagtgcaagtctcagaagctaacctaattggtactggaacaagtgaacactgggtcgatgatgaagggccccagccaaagaaagtaaaggctgaagatgaggccttactctcagaagaagatgaccccattgatcgacggccatggacacagcagcaccttgaagctgcagacatccgtaggacaccatcgctggctctcacccctcctcaggcagagcaggaggtggatgtgttagatgtgaatgtccgtggcccagatggctgcaccccattgatgttggcttctctccgaggaggcagctcagatttgagtgatgaagatgaagatgcagaggactcttctgctaacatcatcacagacttggtctaccagggtgccagcctccaggcccagacagaccggactggtgagatggccctgcaccttgcagcccgctactcacgggctgatgctgccaagcgtctcctggatgcaggtgcagatgccaatgcccaggacaacatgggccgctgtccactccatgctgcagtggcagctgatgcccaaggtgtcttccagattctgattcgcaaccgagtaactgatctagatgccaggatgaatgatggtactacacccctgatcctggctgcccgcctggctgtggagggaatggtggcagaactgatcaactgccaagcggatgtgaatgcagtggatgaccatggaaaatctgctcttcactgggcagctgctgtcaataatgtggaggcaactcttttgttgttgaaaaatggggccaaccgagacatgcaggacaacaaggaagagacacctctgtttcttgctgcccgggaggggagctatgaagcagccaagatcctgttagaccattttgccaatcgagacatcacagaccatatggatcgtcttccccgggatgtggctcgggatcgcatgcaccatgacattgtgcgccttctggatgaatacaatgtgaccccaagccctccaggcaccgtgttgacttctgctctctcacctgtcatctgtgggcccaacagatctttcctcagcctgaagcacaccccaatgggcaagaagtctagacggcccagtgccaagagtaccatgcctactagcctccctaaccttgccaaggaggcaaaggatgccaagggtagtaggaggaagaagtctctgagtgagaaggtccaactgtctgagagttcagtaactttatcccctgttgattccctagaatctcctcacacgtatgtttccgacaccacatcctctccaatgattacatcccctgggatcttacaggcctcacccaaccctatgttggccactgccgcccctcctgccccagtccatgcccagcatgcactatctttttctaaccttcatgaaatgcagcctttggcacatggggccagcactgtgcttccctcagtgagccagttgctatcccaccaccacattgtgtctccaggcagtggcagtgctggaagcttgagtaggctccatccagtcccagtcccagcagattggatgaaccgcatggaggtgaatgagacccagtacaatgagatgtttggtatggtcctggctccagctgagggcacccatcctggcatagctccccagagcaggccacctgaagggaagcacataaccacccctcgggagcccttgccccccattgtgactttccagctcatccctaaaggcagtattgcccaaccagcgggggctccccagcctcagtccacctgccctccagctgttgcgggccccctgcccaccatgtaccagattccagaaatggcccgtttgcccagtgtggctttccccactgccatgatgccccagcaggacgggcaggtagctcagaccattctcccagcctatcatcctttcccagcctctgtgggcaagtaccccacacccccttcacagcacagttatgcttcctcaaatgctgctgagcgaacacccagtcacagtggtcacctccagggtgagcatccctacctgacaccatccccagagtctcctgaccagtggtcaagttcatcaccccactctgcttctgactggtcagatgtgaccaccagccctacccctgggggtgctggaggaggtcagcggggacctgggacacacatgtctgagccaccacacaacaacatgcaggtttatgcgtgagagagtccacctccagtgtagagacataactgacttttgtaaatgctgctgaggaacaaatgaaggtcatccgggagagaaatgaagaaatctctggagccagcttctagaggtaggaaagagaagatgttcttattcagataatgcaagagaagcaattcgtcagtttcactgggtatctgcaaggcttattgattattctaatctaataagacaagtttgtggaaatgcaagatgaatacaagccttgggtccatgtttactctcttctatttggagaataagatggatgcttattgaagcccagacattcttgcagcttggactgcattttaagccctgcaggcttctgccatatccatgagaagattctacactagcgtcctgttgggaattatgccctggaattctgcctgaattgacctacgcatctcctcctccttggacattcttttgtcttcatttggtgcttttggttttgcacctctccgtgattgtagccctaccagcatgttatagggcaagacctttgtgcttttgatcattctggcccatgaaagcaactttggtctcctttcccctcctgtcttcccggtatcccttggagtctcacaaggtttactttggtatggttctcagcacaaacctttcaagtatgttgtttctttggaaaatggacatactgtattgtgttctcctgcatatatcattcctggagagagaaggggagaagaatacttttcttcaacaaattttgggggcaggagatcccttcaagaggctgcaccttaatttttcttgtctgtgtgcaggtcttcatataaactttaccaggaagaagggtgtgagtttgttgtttttctgtgtatgggcctggtcagtgtaaagttttatccttgatagtctagttactatgaccctccccacttttttaaaaccagaaaaaggtttggaatgttggaatgaccaagagacaagttaactcgtgcaagagccagttacccacccacaggtccccctacttcctgccaagcattccattgactgcctgtatggaacacatttgtcccagatctgagcattctaggcctgtttcactcactcacccagcatatgaaactagtcttaactgttgagcctttcctttcatatccacagaagacactgtctcaaatgttgtacccttgccatttaggactgaactttccttagcccaagggacccagtgacagttgtcttccgtttgtcagatgatcagtctctactgattatcttgctgcttaaaggcctgctcaccaatctttctttcacaccgtgtggtccgtgttactggtatacccagtatgttctcactgaagacatggactttatatgttcaagtgcaggaattggaaagttggacttgttttctatgatccaaaacagccctataagaaggttggaaaaggaggaactatatagcagcctttgctattttctgctaccatttcttttcctctgaagcggccatgacattccctttggcaactaacgtagaaactcaacagaacattttcctttcctagagtcaccttttagatgataatggacaactatagacttgctcattgttcagactgattgcccctcacctgaatccactctctgtattcatgctcttggcaatttctttgactttcttttaagggcagaagcattttagttaattgtagataaagaatagttttcttcctcttctccttgggccagttaataattggtccatggctacactgcaacttccgtccagtgctgtgatgcccatgacacctgcaaaataagttctgcctgggcattttgtagatattaacaggtgaattcccgactcttttggtttgaatgacagttctcattccttctatggctgcaagtatgcatcagtgcttcccacttacctgatttgtctgtcggtggccccatatggaaaccctgcgtgtctgttggcataatagtttacaaatggttttttcagtcctatccaaatttattgaaccaacaaaaataattacttctgccctgagataagcagattaagtttgttcattctctgctttattctctccatgtggcaacattctgtcagcctctttcatagtgtgcaaacattttatcattctaaatggtgactctctgcccttggacccatttattattcacagatggggagaacctatctgcatggacctctgtggaccacagcgtacctgcccctttctgccctcctgctccagccccacttctgaaagtatcagctactgatccagccactggatattttatatcctcccttttccttaagcacaatgtcagaccaaattgcttgtttctttttcttggactactttaatttggatcctttgggtttggagaaagggaatgtgaaagctgtcattacagacaacaggtttcagtgatgaggaggacaacactgcctttcaaactttttactgatctcttagattttaagaactcttgaattgtgtggtatctaataaaagggaaggtaagatggataatcactttctcatttgggttctgaattggagactcagtttttatgagacacatcttttatgccatgtatagatcctcccctgctatttttggtttatttttattgttataaatgctttctttctttgactcctcttctgcctgcctttggggataggtttttttgtttgtttatttgcttcctctgttttgttttaagcatcattttcttatgtgaggtggggaagggaaaggtatgagggaaagagagtctgagaattaaaatattttagtataagcaattggctgtgatgctcaaatccattgcatcctcttattgaatttgccaatttgtaatttttgcataataaagaaccaaaggtgtaatgttttgttgagaggtggtttagggattttggccctaaccaatacattgaatgtatgatgactatttgggaggacacatttatgtacccagaggcccccactaataagtggtactatggttacttccttgtgtacatttctcttaaaagtgatattatatctgtttgtatgagaaacccagtaaccaataaaatgaccgcatattcctgactaaacgtagtaaggaaaatgcacactttgtttttacttttccgtttcattctaaaggtagttaagatgaaatttatatgaaagcatttttatcacaaaataaaaaaggtttgccaagctcagtggtgttgtattttttattttccaatactgcatccatggcctggcagtgttacctcatgatgtcataatttgctgagagagcaaattttcttttctttctgaatcccacaaagcctagcaccaaacttctttttttcttcctttaattagatcataaataaatgatcctggggaaaaagcatctgtcaaataggaaacatcacaaaactgagcactcttctgtgcactagccatagctggtgacaaacagatggttgctcagggacaaggtgccttccaatggaaatgcgaagtagttgctatagcaagaattgggaactgggatataagtcataatattaattatgctgttatgtaaatgattggtttgtaacattccttaagtgaaatttgtgtagaacttaatatacaggattataaaataatattttgtgtataaatttgttataagttcacattcatacatttatttataaagtcagtgagatatttgaacatgaa

SEQ ID NO: 704 - protein, 24 aa, Homo sapiens
MPALRPALLWALLALWLCCAAPAH

SEQ ID NO: 705 - protein, 26 aa, Homo sapiens
LQCRDGYEPCVNEGMCVTYHNGTGYC

SEQ ID NO: 706 - protein, 86 aa, Homo sapiens
CPEGFLGEYCQHRDPCEKNRCQNGGTCVAQAMLGKATCRCASGFTGEDCQYSTSHPCFVSRPCLNGGTCHMLSRDTYECTCQVGFT

SEQ ID NO: 707 - protein, 111 aa, Homo sapiens
KECQWTDACLSHPCANGSTCTTVANQFSCKCLTGFTGQKCETDVNECDIPGHCQHGGTCLNLPGSYQCQCPQGFTGQYCDSLYVPCAPSPCVNGGTCRQTGDFTFECNCLP

SEQ ID NO: 708 - protein, 40 aa, Homo sapiens
FEGSTCERNIDDCPNHRCQNGGVCVDGVNTYNCRCPPQWT

SEQ ID NO: 709 - protein, 77 aa, Homo sapiens
QFCTEDVDECLLQPNACQNGGTCANRNGGYGCVCVNGWSGDDCSENIDDCAFASCTPGSTCIDRVASFSCMCPEGKA

SEQ ID NO: 710 - protein, 51 aa, Homo sapiens
LLCHLDDACISNPCHKGALCDTNPLNGQYICTCPQGYKGADCTEDVDECAM

SEQ ID NO: 711 - protein, 2049 aa, Homo sapiens
NSNPCEHAGKCVNTDGAFHCECLKGYAGPRCEMDINECHSDPCQNDATCLDKIGGFTCLCMPGFKGVHCELEINECQSNPCVNNGQCVDKVNRFQCLCPPGFTGPVCQIDIDDCSSTPCLNGAKCIDHPNGYECQCATGFTGVLCEENIDNCDPDPCHHGQCQDGIDSYTCICNPGYMGAICSDQIDECYSSPCLNDGRCIDLVNGYQCNCQPGTSGVNCEINFDDCASNPCIHGICMDGINRYSCVCSPGFTGQRCNIDIDECASNPCRKGATCINGVNGFRCICPEGPHHPSCYSQVNECLSNPCIHGNCTGGLSGYKCLCDAGWVGINCEVDKNECLSNPCQNGGTCDNLVNGYRCTCKKGFKGYNCQVNIDECASNPCLNQGTCFDDISGYTCHCVLPYTGKNCQTVLAPCSPNPCENAAVCKESPNFESYTCLCAPGWQGQRCTIDIDECISKPCMNHGLCHNTQGSYMCECPPGFSGMDCEEDIDDCLANPCQNGGSCMDGVNTFSCLCLPGFTGDKCQTDMNECLSEPCKNGGTCSDYVNSYTCKCQAGFDGVHCENNINECTESSCFNGGTCVDGINSFSCLCPVGFTGSFCLHEINECSSHPCLNEGTCVDGLGTYRCSCPLGYTGKNCQTLVNLCSRSPCKNKGTCVQKKAESQCLCPSGWAGAYCDVPNVSCDIAASRRGVLVEHLCQHSGVCINAGNTHYCQCPLGYTGSYCEEQLDECASNPCQHGATCSDFIGGYRCECVPGYQGVNCEYEVDECQNQPCQNGGTCIDLVNHFKCSCPPGTRGLLCEENIDDCARGPHCLNGGQCMDRIGGYSCRCLPGFAGERCEGDINECLSNPCSSEGSLDCIQLTNDYLCVCRSAFTGRHCETFVDVCPQMPCLNGGTCAVASNMPDGFICRCPPGFSGARCQSSCGQVKCRKGEQCVHTASGPRCFCPSPRDCESGCASSPCQHGGSCHPQRQPPYYSCQCAPPFSGSRCELYTAPPSTPPATCLSQYCADKARDGVCDEACNSHACQWDGGDCSLTMENPWANCSSPLPCWDYINNQCDELCNTVECLFDNFECQGNSKTCKYDKYCADHFKDNHCDQGCNSEECGWDGLDCAADQPENLAEGTLVIVVLMPPEQLLQDARSFLRALGTLLHTNLRIKRDSQGELMVYPYYGEKSAAMKKQRMTRRSLPGEQEQEVAGSKVFLEIDNRQCVQDSDHCFKNTDAAAALLASHAIQGTLSYPLVSVVSESLTPERTQLLYLLAVAVVIILFIILLGVIMAKRKRKHGSLWLPEGFTLRRDASNHKRREPVGQDAVGLKNLSVQVSEANLIGTGTSEHWVDDEGPQPKKVKAEDEALLSEEDDPIDRRPWTQQHLEAADIRRTPSLALTPPQAEQEVDVLDVNVRGPDGCTPLMLASLRGGSSDLSDEDEDAEDSSANIITDLVYQGASLQAQTDRTGEMALHLAARYSRADAAKRLLDAGADANAQDNMGRCPLHAAVAADAQGVFQILIRNRVTDLDARMNDGTTPLILAARLAVEGMVAELINCQADVNAVDDHGKSALHWAAAVNNVEATLLLLKNGANRDMQDNKEETPLFLAAREGSYEAAKILLDHFANRDITDHMDRLPRDVARDRMHHDIVRLLDEYNVTPSPPGTVLTSALSPVICGPNRSFLSLKHTPMGKKSRRPSAKSTMPTSLPNLAKEAKDAKGSRRKKSLSEKVQLSESSVTLSPVDSLESPHTYVSDTTSSPMITSPGILQASPNPMLATAAPPAPVHAQHALSFSNLHEMQPLAHGASTVLPSVSQLLSHHHIVSPGSGSAGSLSRLHPVPVPADWMNRMEVNETQYNEMFGMVLAPAEGTHPGIAPQSRPPEGKHITTPREPLPPIVTFQLIPKGSIAQPAGAPQPQSTCPPAVAGPLPTMYQIPEMARLPSVAFPTAMMPQQDGQVAQTILPAYHPFPASVGKYPTPPSQHSYASSNAAERTPSHSGHLQGEHPYLTPSPESPDQWSSSSPHSASDWSDVTTSPTPGGAGGGQRGPGTHMSEPPHNNMQVYA

SEQ ID NO: 712 - protein, 2471 aa, Homo sapiens
MPALRPALLWALLALWLCCAAPAHALQCRDGYEPCVNEGMCVTYHNGTGYCKCPEGFLGEYCQHRDPCEKNRCQNGGTCVAQAMLGKATCRCASGFTGEDCQYSTSHPCFVSRPCLNGGTCHMLSRDTYECTCQVGFTGKECQWTDACLSHPCANGSTCTTVANQFSCKCLTGFTGQKCETDVNECDIPGHCQHGGTCLNLPGSYQCQCPQGFTGQYCDSLYVPCAPSPCVNGGTCRQTGDFTFECNCLPGFEGSTCERNIDDCPNHRCQNGGVCVDGVNTYNCRCPPQWTGQFCTEDVDECLLQPNACQNGGTCANRNGGYGCVCVNGWSGDDCSENIDDCAFASCTPGSTCIDRVASFSCMCPEGKAGLLCHLDDACISNPCHKGALCDTNPLNGQYICTCPQGYKGADCTEDVDECAMANSNPCEHAGKCVNTDGAFHCECLKGYAGPRCEMDINECHSDPCQNDATCLDKIGGFTCLCMPGFKGVHCELEINECQSNPCVNNGQCVDKVNRFQCLCPPGFTGPVCQIDIDDCSSTPCLNGAKCIDHPNGYECQCATGFTGVLCEENIDNCDPDPCHHGQCQDGIDSYTCICNPGYMGAICSDQIDECYSSPCLNDGRCIDLVNGYQCNCQPGTSGVNCEINFDDCASNPCIHGICMDGINRYSCVCSPGFTGQRCNIDIDECASNPCRKGATCINGVNGFRCICPEGPHHPSCYSQVNECLSNPCIHGNCTGGLSGYKCLCDAGWVGINCEVDKNECLSNPCQNGGTCDNLVNGYRCTCKKGFKGYNCQVNIDECASNPCLNQGTCFDDISGYTCHCVLPYTGKNCQTVLAPCSPNPCENAAVCKESPNFESYTCLCAPGWQGQRCTIDIDECISKPCMNHGLCHNTQGSYMCECPPGFSGMDCEEDIDDCLANPCQNGGSCMDGVNTFSCLCLPGFTGDKCQTDMNECLSEPCKNGGTCSDYVNSYTCKCQAGFDGVHCENNINECTESSCFNGGTCVDGINSFSCLCPVGFTGSFCLHEINECSSHPCLNEGTCVDGLGTYRCSCPLGYTGKNCQTLVNLCSRSPCKNKGTCVQKKAESQCLCPSGWAGAYCDVPNVSCDIAASRRGVLVEHLCQHSGVCINAGNTHYCQCPLGYTGSYCEEQLDECASNPCQHGATCSDFIGGYRCECVPGYQGVNCEYEVDECQNQPCQNGGTCIDLVNHFKCSCPPGTRGLLCEENIDDCARGPHCLNGGQCMDRIGGYSCRCLPGFAGERCEGDINECLSNPCSSEGSLDCIQLTNDYLCVCRSAFTGRHCETFVDVCPQMPCLNGGTCAVASNMPDGFICRCPPGFSGARCQSSCGQVKCRKGEQCVHTASGPRCFCPSPRDCESGCASSPCQHGGSCHPQRQPPYYSCQCAPPFSGSRCELYTAPPSTPPATCLSQYCADKARDGVCDEACNSHACQWDGGDCSLTMENPWANCSSPLPCWDYINNQCDELCNTVECLFDNFECQGNSKTCKYDKYCADHFKDNHCDQGCNSEECGWDGLDCAADQPENLAEGTLVIVVLMPPEQLLQDARSFLRALGTLLHTNLRIKRDSQGELMVYPYYGEKSAAMKKQRMTRRSLPGEQEQEVAGSKVFLEIDNRQCVQDSDHCFKNTDAAAALLASHAIQGTLSYPLVSVVSESLTPERTQLLYLLAVAVVIILFIILLGVIMAKRKRKHGSLWLPEGFTLRRDASNHKRREPVGQDAVGLKNLSVQVSEANLIGTGTSEHWVDDEGPQPKKVKAEDEALLSEEDDPIDRRPWTQQHLEAADIRRTPSLALTPPQAEQEVDVLDVNVRGPDGCTPLMLASLRGGSSDLSDEDEDAEDSSANIITDLVYQGASLQAQTDRTGEMALHLAARYSRADAAKRLLDAGADANAQDNMGRCPLHAAVAADAQGVFQILIRNRVTDLDARMNDGTTPLILAARLAVEGMVAELINCQADVNAVDDHGKSALHWAAAVNNVEATLLLLKNGANRDMQDNKEETPLFLAAREGSYEAAKILLDHFANRDITDHMDRLPRDVARDRMHHDIVRLLDEYNVTPSPPGTVLTSALSPVICGPNRSFLSLKHTPMGKKSRRPSAKSTMPTSLPNLAKEAKDAKGSRRKKSLSEKVQLSESSVTLSPVDSLESPHTYVSDTTSSPMITSPGILQASPNPMLATAAPPAPVHAQHALSFSNLHEMQPLAHGASTVLPSVSQLLSHHHIVSPGSGSAGSLSRLHPVPVPADWMNRMEVNETQYNEMFGMVLAPAEGTHPGIAPQSRPPEGKHITTPREPLPPIVTFQLIPKGSIAQPAGAPQPQSTCPPAVAGPLPTMYQIPEMARLPSVAFPTAMMPQQDGQVAQTILPAYHPFPASVGKYPTPPSQHSYASSNAAERTPSHSGHLQGEHPYLTPSPESPDQWSSSSPHSASDWSDVTTSPTPGGAGGGQRGPGTHMSEPPHNNMQVYA

SEQ ID NO: 713 - DNA, 1364 bp, Homo sapiens
aggctgcttcgttgcacacccgagaaagtttcagccaaacttcgggcggcggctgaggcggcggccgaggagcggcggactcggggcgcggggagtcgaggcatttgcgcctgggcttcggagcgtagcgccagggcctgagcctttgaagcaggaggaggggaggagagagtggggctcctctatcgggaccccctccccatgtggatctgcccaggcggcggcggcggcggcggaggaggaggcgaccgagaagatgcccgccctgcgccccgctctgctgtgggcgctgctggcgctctggctgtgctgcgcggcccccgcgcatgcattgcagtgtcgagatggctatgaaccctgtgtaaatgaaggaatgtgtgttacctaccacaatggcacaggatactgcaaatgtccagaaggcttcttgggggaatattgtcaacatcgagacccctgtgagaagaaccgctgccagaatggtgggacttgtgtggcccaggccatgctggggaaagccacgtgccgatgtgcctcagggtttacaggagaggactgccagtactcaacatctcatccatgctttgtgtctcgaccctgcctgaatggcggcacatgccatatgctcagccgggatacctatgagtgcacctgtcaagtcgggtttacaggtaaggagtgccaatggacggatgcctgcctgtctcatccctgtgcaaatggaagtacctgtaccactgtggccaaccagttctcctgcaaatgcctcacaggcttcacagggcagaaatgtgagactgatgtcaatgagtgtgacattccaggacactgccagcatggtggcacctgcctcaacctgcctggttcctaccagtgccagtgccctcagggcttcacaggccagtactgtgacagcctgtatgtgccctgtgcaccctcaccttgtgtcaatggaggcacctgtcggcagactggtgacttcacttttgagtgcaactgccttccaggttttgaagggagcacctgtgagaggaatattgatgactgccctaaccacaggtgtcagaatggaggggtttgtgtggatggggtcaacacttacaactgccgctgtcccccacaatggacaggacagttctgcacagaggatgtggatgaatgcctgctgcagcccaatgcctgtcaaaatgggggcacctgtgccaaccgcaatggaggctatggctgtgtatgtgtcaacggctggagtggagatgactgcagtgagaacattgatgattgtgccttcgcctcctgtactccaggctccacctgcatcgaccgtgtggcctccttctcttgcatgtgcccagaggggaaggcag

SEQ ID NO: 714 - protein, 369 aa, Homo sapiens
MPALRPALLWALLALWLCCAAPAHALQCRDGYEPCVNEGMCVTYHNGTGYCKCPEGFLGEYCQHRDPCEKNRCQNGGTCVAQAMLGKATCRCASGFTGEDCQYSTSHPCFVSRPCLNGGTCHMLSRDTYECTCQVGFTGKECQWTDACLSHPCANGSTCTTVANQFSCKCLTGFTGQKCETDVNECDIPGHCQHGGTCLNLPGSYQCQCPQGFTGQYCDSLYVPCAPSPCVNGGTCRQTGDFTFECNCLPGFEGSTCERNIDDCPNHRCQNGGVCVDGVNTYNCRCPPQWTGQFCTEDVDECLLQPNACQNGGTCANRNGGYGCVCVNGWSGDDCSENIDDCAFASCTPGSTCIDRVASFSCMCPEGKA

SEQ ID NO: 715 - DNA, 75 bp, Homo sapiens
agggccggctggacaaactgacagtcacctcccagaacctgcagctggagaacctgcgcatgaagcttcccaagc

SEQ ID NO: 716 - DNA, 75 bp, Homo sapiens; identical to SEQ ID NO: 634

SEQ ID NO: 717 - DNA, 150 bp, Homo sapiens
agggccggctggacaaactgacagtcacctcccagaacctgcagctggagaacctgcgcatgaagcttcccaagcccttgcctccccgattgaaagagatgaaaagccaggaatcggctgcaggttccaaactagtccttcggtgtgaaa

SEQ ID NO: 718 - protein, 49 aa, Homo sapiens
GRLDKLTVTSQNLQLENLRMKLPKPLPPRLKEMKSQESAAGSKLVLRCE

SEQ ID NO: 719 - DNA, 286 bp, Homo sapiens
atcctgccccgcaaaaggcagcttcaccaaagtggggtatttccagcctttgtagctttcacttccacatctaccaagtgggcggagtggccttctgtggacgaatcagattcctctccagcaccgactttaagaggcgagccggggggtcagggtcccagatgcacaggaggagaagcaggagctgtcgggaagatcagaagccagtcatggatgaccagcgcgaccttatctccaacaatgagcaactgcccatgctgggccggcgccctggggccccggagag

SEQ ID NO: 720 - DNA, 173 bp, Homo sapiens
caagtgcagccgcggagccctgtacacaggcttttccatcctggtgactctgctcctcgctggccaggccaccaccgcctacttcctgtaccagcagcagggccggctggacaaactgacagtcacctcccagaacctgcagctggagaacctgcgcatgaagcttcccaagc

SEQ ID NO: 721 - DNA, 80 bp, Homo sapiens
ctcccaagcctgtgagcaagatgcgcatggccaccccgctgctgatgcaggcgctgcccatgggagccctgccccagggg

SEQ ID NO: 722 - DNA, 63 bp, Homo sapiens
cccatgcagaatgccaccaagtatggcaacatgacagaggaccatgtgatgcacctgctccag

SEQ ID NO: 723 - DNA, 96 bp, Homo sapiens
aatgctgaccccctgaaggtgtacccgccactgaaggggagcttcccggagaacctgagacaccttaagaacaccatggagaccatagactggaag

SEQ ID NO: 724 - DNA, 88 bp, Homo sapiens
gtctttgagagctggatgcaccattggctcctgtttgaaatgagcaggcactccttggagcaaaagcccactgacgctccaccgaaag

SEQ ID NO: 725 - DNA, 192 bp, Homo sapiens
tactgaccaagtgccaggaagaggtcagccacatccctgctgtccacccgggttcattcaggcccaagtgcgacgagaacggcaactatctgccactccagtgctatgggagcatcggctactgctggtgtgtcttccccaacggcacggaggtccccaacaccagaagccgcgggcaccataactgcagtg

SEQ ID NO: 726 - DNA, 63 bp, Homo sapiens
agtcactggaactggaggacccgtcttctgggctgggtgtgaccaagcaggatctgggcccag

SEQ ID NO: 727 - DNA, 612 bp, Homo sapiens
tccccatgtgagagcagcagaggcggtcttcaacatcctgccagccccacacagctacagctttcttgctcccttcagcccccagcccctcccccatctcccaccctgtacctcatcccatgagaccctggtgcctggctctttcgtcacccttggacaagacaaaccaagtcggaacagcagataacaatgcagcaaggccctgctgcccaatctccatctgtcaacaggggcgtgaggtcccaggaagtggccaaaagctagacagatccccgttcctgacatcacagcagcctccaacacaaggctccaagacctaggctcatggacgagatgggaaggcacagggagaagggataaccctacacccagaccccaggctggacatgctgactgtcctctcccctccagcctttggccttggcttttctagcctatttacctgcaggctgagccactctcttccctttccccagcatcactccccaaggaagagccaatgttttccacccataatcctttctgccgacccctagttccctctgctcagccaagcttgttatcagctttcagggccatggttcacattagaataaaaggtagtaattagaa

SEQ ID NO: 728 - DNA, 1653 bp, Artificial Sequence
  Full mRNA polynucleotide sequence of CD74
atcctgccccgcaaaaggcagcttcaccaaagtggggtatttccagcctttgtagctttcacttccacatctaccaagtgggcggagtggccttctgtggacgaatcagattcctctccagcaccgactttaagaggcgagccggggggtcagggtcccagatgcacaggaggagaagcaggagctgtcgggaagatcagaagccagtcatggatgaccagcgcgaccttatctccaacaatgagcaactgcccatgctgggccggcgccctggggccccggagagcaagtgcagccgcggagccctgtacacaggcttttccatcctggtgactctgctcctcgctggccaggccaccaccgcctacttcctgtaccagcagcagggccggctggacaaactgacagtcacctcccagaacctgcagctggagaacctgcgcatgaagcttcccaagcctcccaagcctgtgagcaagatgcgcatggccaccccgctgctgatgcaggcgctgcccatgggagccctgccccaggggcccatgcagaatgccaccaagtatggcaacatgacagaggaccatgtgatgcacctgctccagaatgctgaccccctgaaggtgtacccgccactgaaggggagcttcccggagaacctgagacaccttaagaacaccatggagaccatagactggaaggtctttgagagctggatgcaccattggctcctgtttgaaatgagcaggcactccttggagcaaaagcccactgacgctccaccgaaagtactgaccaagtgccaggaagaggtcagccacatccctgctgtccacccgggttcattcaggcccaagtgcgacgagaacggcaactatctgccactccagtgctatgggagcatcggctactgctggtgtgtcttccccaacggcacggaggtccccaacaccagaagccgcgggcaccataactgcagtgagtcactggaactggaggacccgtcttctgggctgggtgtgaccaagcaggatctgggcccagtccccatgtgagagcagcagaggcggtcttcaacatcctgccagccccacacagctacagctttcttgctcccttcagcccccagcccctcccccatctcccaccctgtacctcatcccatgagaccctggtgcctggctctttcgtcacccttggacaagacaaaccaagtcggaacagcagataacaatgcagcaaggccctgctgcccaatctccatctgtcaacaggggcgtgaggtcccaggaagtggccaaaagctagacagatccccgttcctgacatcacagcagcctccaacacaaggctccaagacctaggctcatggacgagatgggaaggcacagggagaagggataaccctacacccagaccccaggctggacatgctgactgtcctctcccctccagcctttggccttggcttttctagcctatttacctgcaggctgagccactctcttccctttccccagcatcactccccaaggaagagccaatgttttccacccataatcctttctgccgacccctagttccctctgctcagccaagcttgttatcagctttcagggccatggttcacattagaataaaaggtagtaattagaa

SEQ ID NO: 729 - protein, 41 aa, Homo sapiens
MHRRRSRSCREDQKPVMDDQRDLISNNEQLPMLGRRPGAPE

SEQ ID NO: 730 - protein, 57 aa, Homo sapiens
KCSRGALYTGFSILVTLLLAGQATTAYFLYQQQGRLDKLTVTSQNLQLENLRMKLPK

SEQ ID NO: 731 - protein, 26 aa, Homo sapiens
PKPVSKMRMATPLLMQALPMGALPQG

SEQ ID NO: 732 - protein, 21 aa, Homo sapiens
PMQNATKYGNMTEDHVMHLLQ

SEQ ID NO: 733 - protein, 32 aa, Homo sapiens
NADPLKVYPPLKGSFPENLRHLKNTMETIDWK

SEQ ID NO: 734 - protein, 29 aa, Homo sapiens
VFESWMHHWLLFEMSRHSLEQKPTDAPPK

SEQ ID NO: 735 - protein, 63 aa, Homo sapiens
LTKCQEEVSHIPAVHPGSFRPKCDENGNYLPLQCYGSIGYCWCVFPNGTEVPNTRSRGHHNCS

SEQ ID NO: 736 - protein, 20 aa, Homo sapiens
SLELEDPSSGLGVTKQDLGP

SEQ ID NO: 737 - protein, 2 aa, Homo sapiens
PM

SEQ ID NO: 738 - protein, 296 aa, Homo sapiens
MHRRRSRSCREDQKPVMDDQRDLISNNEQLPMLGRRPGAPESKCSRGALYTGFSILVTLLLAGQATTAYFLYQQQGRLDKLTVTSQNLQLENLRMKLPKPPKPVSKMRMATPLLMQALPMGALPQGPMQNATKYGNMTEDHVMHLLQNADPLKVYPPLKGSFPENLRHLKNTMETIDWKVFESWMHHWLLFEMSRHSLEQKPTDAPPKVLTKCQEEVSHIPAVHPGSFRPKCDENGNYLPLQCYGSIGYCWCVFPNGTEVPNTRSRGHHNCSESLELEDPSSGLGVTKQDLGPVPM

SEQ ID NO: 739 - DNA, 459 bp, Homo sapiens
atcctgccccgcaaaaggcagcttcaccaaagtggggtatttccagcctttgtagctttcacttccacatctaccaagtgggcggagtggccttctgtggacgaatcagattcctctccagcaccgactttaagaggcgagccggggggtcagggtcccagatgcacaggaggagaagcaggagctgtcgggaagatcagaagccagtcatggatgaccagcgcgaccttatctccaacaatgagcaactgcccatgctgggccggcgccctggggccccggagagcaagtgcagccgcggagccctgtacacaggcttttccatcctggtgactctgctcctcgctggccaggccaccaccgcctacttcctgtaccagcagcagggccggctggacaaactgacagtcacctcccagaacctgcagctggagaacctgcgcatgaagcttcccaagc

SEQ ID NO: 740 - protein, 99 aa, Homo sapiens
MHRRRSRSCREDQKPVMDDQRDLISNNEQLPMLGRRPGAPESKCSRGALYTGFSILVTLLLAGQATTAYFLYQQQGRLDKLTVTSQNLQLENLRMKLPK

SEQ ID NO: 741 - DNA, 75 bp, Homo sapiens
taccagacgatgaggatgtagtggggcccgggcaggaatctgatgactttgagctgtctggctctggagatctgg

SEQ ID NO: 742 - DNA, 75 bp, Homo sapiens; identical to SEQ ID NO: 634

SEQ ID NO: 743 - DNA, 150 bp, Homo sapiens
taccagacgatgaggatgtagtggggcccgggcaggaatctgatgactttgagctgtctggctctggagatctggccttgcctccccgattgaaagagatgaaaagccaggaatcggctgcaggttccaaactagtccttcggtgtgaaa

SEQ ID NO: 744 - protein, 49 aa, Homo sapiens
PDDEDVVGPGQESDDFELSGSGDLALPPRLKEMKSQESAAGSKLVLRCE

SEQ ID NO: 745 - DNA, 100 bp, Homo sapiens
actcgccgcagcctgcgcgccttctccagtccgcggtgccatggcccccgcccgtctgttcgcgctgctgctgttcttcgtaggcggagtcgccgagtcg

SEQ ID NO: 746 - DNA, 139 bp, Homo sapiens
atccgagagactgaggtcatcgacccccaggacctcctagaaggccgatacttctccggagccctaccagacgatgaggatgtagtggggcccgggcaggaatctgatgactttgagctgtctggctctggagatctgg

SEQ ID NO: 747 - DNA, 47 bp, Homo sapiens
atgacttggaagactccatgatcggccctgaagttgtccatcccttg

SEQ ID NO: 748 - DNA, 199 bp, Homo sapiens
gtgcctctagataaccatatccctgagagggcagggtctgggagccaagtccccaccgaacccaagaaactagaggagaatgaggttatccccaagagaatctcacccgttgaagagagtgaggatgtgtccaacaaggtgtcaatgtccagcactgtgcagggcagcaacatctttgagagaacggaggtcctggcag

SEQ ID NO: 749 - DNA, 2128 bp, Homo sapiens
ctctgattgtgggtggcatcgtgggcatcctctttgccgtcttcctgatcctactgctcatgtaccgtatgaagaagaaggatgaaggcagctatgacctgggcaagaaacccatctacaagaaagcccccaccaatgagttctacgcgtgaagcttgcttgtgggcactggcttggactttagcggggagggaagccaggggattttgaagggtggacattagggtagggtgaggtcaacctaatactgacttgtcagtatctccagctctgattacctttgaagtgttcagaagagacattgtcttctactgttctgccaggttcttcttgagctttgggcctcagttgccctggcagaaaaatggattcaacttggcctttctgaaggcaagactgggattggatcacttcttaaacttccagttaagaatctaggtccgccctcaagcccatactgaccatgcctcatccagagctcctctgaagccagggggctaacggatgttgtgtggagtcctggctggaggtcctcccccagtggccttcctcccttcctttcacagccggtctctctgccaggaaatgggggaaggaactagaaccacctgcaccttgagatgtttctgtaaatgggtacttgtgatcacactacgggaatctctgtggtatatacctggggccattctaggctctttcaagtgacttttggaaatcaaccttttttatttgggggggaggatggggaaaagagctgagagtttatgctgaaatggatttatagaatatttgtaaatctatttttagtgtttgttcgtttttttaactgttcattcctttgtgcagagtgtatatctctgcctgggcaagagtgtggaggtgccgaggtgtcttcattctctcgcacatttccacagcacctgctaagtttgtatttaatggtttttgtttttgtttttgtttgtttcttgaaaatgagagaagagccggagagatgatttttattaattttttttttttttttttttttttactatttatagctttagatagggcctcccttcccctcttctttctttgttctctttcattaaaccccttccccagttttttttttatactttaaaccccgctcctcatggccttggccctttctgaagctgcttcctcttataaaatagcttttgccgaaacatagtttttttttagcagatcccaaaatataatgaaggggatggtgggatatttgtgtctgtgttcttataatatattattattcttccttggttctagaaaaatagataaatatatttttttcaggaaatagtgtggtgtttccagtttgatgttgctgggtggttgagtgagtgaattttcatgtggctgggtgggtttttgcctttttctcttgccctgttcctggtgccttctgatggggctggaatagttgaggtggatggttctaccctttctgccttctgtttgggacccagctggtgttctttggtttgctttcttcaggctctagggctgtgctatccaatacagtaaccacatgcggctgtttaaagttaagccaattaaaatcacataagattaaaaattccttcctcagttgcactaaccacgtttctagaggcgtcactgtatgtagttcatggctactgtactgacagcgagagcatgtccatctgttggacagcactattctagagaactaaactggcttaacgagtcacagcctcagctgtgctgggacgacccttgtctccctgggtaggggggggggaatgggggagggctgatgaggccccagctggggcctgttgtctgggaccctccctctcctgagaggggaggcctggtggcttagcctgggcaggtcgtgtctcctcctgaccccagtggctgcggtgaggggaaccaccctcccttgctgcaccagtggccattagctcccgtcaccactgcaacccagggtcccagctggctgggtcctcttctgcccccagtgcccttccccttgggctgtgttggagtgagcacctcctctgtaggcacctctcacactgttgtctgttactgattttttttgataaaaagataataaaacctggtactttctaaa

SEQ ID NO: 750 - DNA, 2613 bp, Artificial Sequence
  Full mRNA polynucleotide sequence of SDC4
actcgccgcagcctgcgcgccttctccagtccgcggtgccatggcccccgcccgtctgttcgcgctgctgctgttcttcgtaggcggagtcgccgagtcgatccgagagactgaggtcatcgacccccaggacctcctagaaggccgatacttctccggagccctaccagacgatgaggatgtagtggggcccgggcaggaatctgatgactttgagctgtctggctctggagatctggatgacttggaagactccatgatcggccctgaagttgtccatcccttggtgcctctagataaccatatccctgagagggcagggtctgggagccaagtccccaccgaacccaagaaactagaggagaatgaggttatccccaagagaatctcacccgttgaagagagtgaggatgtgtccaacaaggtgtcaatgtccagcactgtgcagggcagcaacatctttgagagaacggaggtcctggcagctctgattgtgggtggcatcgtgggcatcctctttgccgtcttcctgatcctactgctcatgtaccgtatgaagaagaaggatgaaggcagctatgacctgggcaagaaacccatctacaagaaagcccccaccaatgagttctacgcgtgaagcttgcttgtgggcactggcttggactttagcggggagggaagccaggggattttgaagggtggacattagggtagggtgaggtcaacctaatactgacttgtcagtatctccagctctgattacctttgaagtgttcagaagagacattgtcttctactgttctgccaggttcttcttgagctttgggcctcagttgccctggcagaaaaatggattcaacttggcctttctgaaggcaagactgggattggatcacttcttaaacttccagttaagaatctaggtccgccctcaagcccatactgaccatgcctcatccagagctcctctgaagccagggggctaacggatgttgtgtggagtcctggctggaggtcctcccccagtggccttcctcccttcctttcacagccggtctctctgccaggaaatgggggaaggaactagaaccacctgcaccttgagatgtttctgtaaatgggtacttgtgatcacactacgggaatctctgtggtatatacctggggccattctaggctctttcaagtgacttttggaaatcaaccttttttatttgggggggaggatggggaaaagagctgagagtttatgctgaaatggatttatagaatatttgtaaatctatttttagtgtttgttcgtttttttaactgttcattcctttgtgcagagtgtatatctctgcctgggcaagagtgtggaggtgccgaggtgtcttcattctctcgcacatttccacagcacctgctaagtttgtatttaatggtttttgtttttgtttttgtttgtttcttgaaaatgagagaagagccggagagatgatttttattaattttttttttttttttttttttttactatttatagctttagatagggcctcccttcccctcttctttctttgttctctttcattaaaccccttccccagttttttttttatactttaaaccccgctcctcatggccttggccctttctgaagctgcttcctcttataaaatagcttttgccgaaacatagtttttttttagcagatcccaaaatataatgaaggggatggtgggatatttgtgtctgtgttcttataatatattattattcttccttggttctagaaaaatagataaatatatttttttcaggaaatagtgtggtgtttccagtttgatgttgctgggtggttgagtgagtgaattttcatgtggctgggtgggtttttgcctttttctcttgccctgttcctggtgccttctgatggggctggaatagttgaggtggatggttctaccctttctgccttctgtttgggacccagctggtgttctttggtttgctttcttcaggctctagggctgtgctatccaatacagtaaccacatgcggctgtttaaagttaagccaattaaaatcacataagattaaaaattccttcctcagttgcactaaccacgtttctagaggcgtcactgtatgtagttcatggctactgtactgacagcgagagcatgtccatctgttggacagcactattctagagaactaaactggcttaacgagtcacagcctcagctgtgctgggacgacccttgtctccctgggtaggggggggggaatgggggagggctgatgaggccccagctggggcctgttgtctgggaccctccctctcctgagaggggaggcctggtggcttagcctgggcaggtcgtgtctcctcctgaccccagtggctgcggtgaggggaaccaccctcccttgctgcaccagtggccattagctcccgtcaccactgcaacccagggtcccagctggctgggtcctcttctgcccccagtgcccttccccttgggctgtgttggagtgagcacctcctctgtaggcacctctcacactgttgtctgttactgattttttttgataaaaagataataaaacctggtactttctaaa

SEQ ID NO: 751 - protein, 20 aa, Homo sapiens
MAPARLFALLLFFVGGVAES

SEQ ID NO: 752 - protein, 46 aa, Homo sapiens
IRETEVIDPQDLLEGRYFSGALPDDEDVVGPGQESDDFELSGSGDL

SEQ ID NO: 753 - protein, 15 aa, Homo sapiens
DLEDSMIGPEVVHPL

SEQ ID NO: 754 - protein, 66 aa, Homo sapiens
VPLDNHIPERAGSGSQVPTEPKKLEENEVIPKRISPVEESEDVSNKVSMSSTVQGSNIFERTEVLA

SEQ ID NO: 755 - protein, 49 aa, Homo sapiens
LIVGGIVGILFAVFLILLLMYRMKKKDEGSYDLGKKPIYKKAPTNEFYA

SEQ ID NO: 756 - protein, 198 aa, Homo sapiens
MAPARLFALLLFFVGGVAESIRETEVIDPQDLLEGRYFSGALPDDEDVVGPGQESDDFELSGSGDLDDLEDSMIGPEVVHPLVPLDNHIPERAGSGSQVPTEPKKLEENEVIPKRISPVEESEDVSNKVSMSSTVQGSNIFERTEVLAALIVGGIVGILFAVFLILLLMYRMKKKDEGSYDLGKKPIYKKAPTNEFYA

SEQ ID NO: 757 - DNA, 239 bp, Homo sapiens
actcgccgcagcctgcgcgccttctccagtccgcggtgccatggcccccgcccgtctgttcgcgctgctgctgttcttcgtaggcggagtcgccgagtcgatccgagagactgaggtcatcgacccccaggacctcctagaaggccgatacttctccggagccctaccagacgatgaggatgtagtggggcccgggcaggaatctgatgactttgagctgtctggctctggagatctgg

SEQ ID NO: 758 - protein, 66 aa, Homo sapiens
MAPARLFALLLFFVGGVAESIRETEVIDPQDLLEGRYFSGALPDDEDVVGPGQESDDFELSGSGDL

SEQ ID NO: 759 - DNA, 75 bp, Homo sapiens
tttctactgtacaccccatcccagacgaagacagtccctggatcaccgacagcacagacagaatccctgctacca

SEQ ID NO: 760 - DNA, 75 bp, Homo sapiens; identical to SEQ ID NO: 692

SEQ ID NO: 761 - DNA, 150 bp, Homo sapiens
tttctactgtacaccccatcccagacgaagacagtccctggatcaccgacagcacagacagaatccctgctaccactacatctacatccaccactgggacaagccatcttgtaaaatgtgcggagaaggagaaaactttctgtgtgaatg

SEQ ID NO: 762 - protein, 49 aa, Homo sapiens
STVHPIPDEDSPWITDSTDRIPATTTSTSTTGTSHLVKCAEKEKTFCVN

SEQ ID NO: 763 - DNA, 75 bp, Homo sapiens
actaccccatcaactccaacttcaaagtgggctacaacactctcttttcctgtacctgtgtgccacctgacccag

SEQ ID NO: 764 - DNA, 75 bp, Homo sapiens; identical to SEQ ID NO: 692

SEQ ID NO: 765 - DNA, 150 bp, Homo sapiens
actaccccatcaactccaacttcaaagtgggctacaacactctcttttcctgtacctgtgtgccacctgacccagctacatctacatccaccactgggacaagccatcttgtaaaatgtgcggagaaggagaaaactttctgtgtgaatg

SEQ ID NO: 766 - protein, 49 aa, Homo sapiens
YPINSNFKVGYNTLFSCTCVPPDPATSTSTTGTSHLVKCAEKEKTFCVN

SEQ ID NO: 767 - DNA, 143 bp, Homo sapiens
ggcggcgcgccgggcagcgcttcggtggcggcggcggccgcggtggcagcgaaggcggcggcggcggcggcagtggcagtggccgctgcagccccacactccgccgccaaactggaggagcgacggaagccagaccccaggag

SEQ ID NO: 768 - DNA, 74 bp, Homo sapiens
gatggaggatgaagctgtcctggacagaggggcttccttcctcaagcatgtgtgtgatgaagaagaagtagaag

SEQ ID NO: 769 - DNA, 180 bp, Homo sapiens
gccaccataccatttacatcggagtccatgtgccgaagagttacaggagaaggagacgtcacaagagaaagacagggcacaaagaaaagaaggaaaaggagagaatctctgagaactactctgacaaatcagatattgaaaatgctgatgaatccagcagcagcatcctaaaacctctca

SEQ ID NO: 770 - DNA, 136 bp, Homo sapiens
tctctcctgctgcagaacgcatccgattcatcttgggagaggaggatgacagcccagctccccctcagctcttcacggaactggatgagctgctggccgtggatgggcaggagatggagtggaaggaaacagccag

SEQ ID NO: 771 - DNA, 161 bp, Homo sapiens
gtggatcaagtttgaagaaaaagtggaacagggtggggaaagatggagcaagccccatgtggccacattgtcccttcatagtttatttgagctgaggacatgtatggagaaaggatccatcatgcttgatcgggaggcttcttctctcccacagttggtgg

SEQ ID NO: 772 - DNA, 180 bp, Homo sapiens
agatgattgttgaccatcagattgagacaggcctattgaaacctgaacttaaggataaggtgacctatactttgctccggaagcaccggcatcaaaccaagaaatccaaccttcggtccctggctgacattgggaagacagtctccagtgcaagtaggatgtttaccaaccctgataatg

SEQ ID NO: 773 - DNA, 77 bp, Homo sapiens
gtagcccagccatgacccataggaatctgacttcctccagtctgaatgacatttctgataaaccggagaaggaccag

SEQ ID NO: 774 - DNA, 158 bp, Homo sapiens
ctgaagaataagttcatgaaaaaattgccacgtgatgcagaagcttccaacgtgcttgttggggaggttgactttttggatactcctttcattgcctttgttaggctacagcaggctgtcatgctgggtgccctgactgaagttcctgtgcccacaag

SEQ ID NO: 775 - DNA, 88 bp, Homo sapiens
gttcttgttcattctcttaggtcctaaggggaaagccaagtcctaccacgagattggcagagccattgccaccctgatgtctgatgag

SEQ ID NO: 776 - DNA, 155 bp, Homo sapiens
gtgttccatgacattgcttataaagcaaaagacaggcacgacctgattgctggtattgatgagttcctagatgaagtcatcgtccttccacctggggaatgggatccagcaattaggatagagcctcctaagagtcttccatcctctgacaaaag

SEQ ID NO: 777 - DNA, 114 bp, Homo sapiens
aaagaatatgtactcaggtggagagaatgttcagatgaatggggatacgccccatgatggaggtcacggaggaggaggacatggggattgtgaagaattgcagcgaactggacg

SEQ ID NO: 778 - DNA, 175 bp, Homo sapiens
gttctgtggtggactaattaaagacataaagaggaaagcgccattttttgccagtgatttttatgatgctttaaatattcaagctctttcggcaattctcttcatttatctggcaactgtaactaatgctatcacttttggaggactgcttggggatgccactgacaacatgcag

SEQ ID NO: 779 - DNA, 134 bp, Homo sapiens
ggcgtgttggagagtttcctgggcactgctgtctctggagccatcttttgcctttttgctggtcaaccactcactattctgagcagcaccggacctgtcctagtttttgagaggcttctatttaatttcagcaa

SEQ ID NO: 780 - DNA, 272 bp, Homo sapiens
ggacaataattttgactatttggagtttcgcctttggattggcctgtggtccgccttcctatgtctcattttggtagccactgatgccagcttcttggttcaatacttcacacgtttcacggaggagggcttttcctctctgattagcttcatctttatctatgatgctttcaagaagatgatcaagcttgcagattactaccccatcaactccaacttcaaagtgggctacaacactctcttttcctgtacctgtgtgccacctgacccag

SEQ ID NO: 781 - DNA, 71 bp, Homo sapiens
ctaatatctcaatatctaatgacaccacactggccccagagtatttgccaactatgtcttctactgacatg

SEQ ID NO: 782 - DNA, 192 bp, Homo sapiens
taccataatactacctttgactgggcatttttgtcgaagaaggagtgttcaaaatacggaggaaacctcgtcgggaacaactgtaattttgttcctgatatcacactcatgtcttttatcctcttcttgggaacctacacctcttccatggctctgaaaaaattcaaaactagtccttattttccaaccaca

SEQ ID NO: 783 - DNA, 114 bp, Homo sapiens
gcaagaaaactgatcagtgattttgccattatcttgtccattctcatcttttgtgtaatagatgccctagtaggcgtggacaccccaaaactaattgtgccaagtgagttcaag

SEQ ID NO: 784 - DNA, 162 bp, Homo sapiens
ccaacaagtccaaaccgaggttggttcgttccaccgtttggagaaaacccctggtgggtgtgccttgctgctgctatcccggctttgttggtcactatactgattttcatggaccaacaaattacagctgtgattgtaaacaggaaagaacataaactcaag

SEQ ID NO: 785 - DNA, 179 bp, Homo sapiens
aaaggagcagggtatcacttggatctcttttgggtggccatcctcatggttatatgctccctcatggctcttccgtggtatgtagctgctacggtcatctccattgctcacatcgacagtttgaagatggagacagagacttctgcacctggagaacaaccaaagtttctaggagtgag

SEQ ID NO: 786 - DNA, 73 bp, Homo sapiens
ggaacaaagagtcactggaacccttgtgtttattctgactggtctgtcagtctttatggctcccatcttgaag

SEQ ID NO: 787 - DNA, 70 bp, Homo sapiens
gtttatacccatgcctgtactctatggtgtgttcctgtatatgggagtagcatcccttaatggtgtgcag

SEQ ID NO: 788 - DNA, 174 bp, Homo sapiens
ttcatggatcgtctgaagctgcttctgatgcctctgaagcatcagcctgacttcatctacctgcgtcatgttcctctgcgcagagtccacctgttcactttcctgcaggtgttgtgtctggccctgctttggatcctcaagtcaacggtggctgctatcatttttccagtaatg

SEQ ID NO: 789 - DNA, 162 bp, Homo sapiens
atcttggcacttgtagctgtcagaaaaggcatggactacctcttctcccagcacgacctcagcttcctggatgatgtcattccagaaaaggacaagaaaaagaaggaggatgagaagaaaaagaaaaagaagaagggaagtctggacagtgacaatgatgat

SEQ ID NO: 790 - DNA, 97 bp, Homo sapiens
tctgactgcccatactcagaaaaagttccaagtattaaaattccaatggacatcatggaacagcaacctttcctaagcgatagcaaaccttctgaca

SEQ ID NO: 791 - DNA, 80 bp, Homo sapiens
gagaaagatcaccaacattccttgaacgccacacatcatgctgataaaattcctttccttcagtcactcggtatgccaag

SEQ ID NO: 792 - DNA, 4296 bp, Homo sapiens
tcctcctagaactccagtaaaagttgtgcctcaaattagaatagaacttgaacctgaagacaatgattatttctggaggagcaagggaacagaaactacattgtaacctgtttgtctttcttaaaactgacatttgttgttaatgtcatttgtttttgtttggctgtttgtttattttttaacttttatttcgtctcagtttttggtcacaggccaaataatacagcgctctctctgcttctctcttgcatagacacaatcaagacaatagtgcaccgttccttaaaaacagcatctgaggaatcccccttttgttcttaaactttcagatgtgtcctttgataaccaaattctgtcactcaagacacagacacgcacagaccctgtcctttgcctctattaagcagaggatggaagtattaaggattttgtaacaccttttatgaaaatgttgaaggaacttaaaactttagctttggagctgtgcttactggcttgtctttgtctggtagaacaaaccttgacctccagacagagtcccttctcacttatagagctctccaggactggaaaaagtgctgctattttaacttgctcttgcttgtaaatcctaatcttagagttatcaaaagaagaaaaaactgaaggtactttactccctatagagaaaccattgccatcattgtagcaagtgctggaatgtcccttttttcctatgcaactttttttaaccctttaatgaacttatctgttgagtacattgaagaatatttttcttcctagattttgttgtttaaattatggggcctaacctgccacttattttttgtcaatttttaaaacttttttttaattactgtaaagaaaatgaattttttcctgcagcaggaaacatagttttgagtagttctacctcttatttgtagctgccaggctttctgtaaaaattgtattgtatataatgtgatttttacacatacatacacacacaaatacacaatctctagggtaagccagaaggcaagatcagattaaaaacaccatgtttctaagcatccatttttccctttctttaaaagaaacttaactgttctatgaaggagattgagggagaagagacaaactcctatgtcatgagaataaccgatgttctgataatagtagcatctaggtacagatgctggttgtattaccacgtcaatgtcctatgcagtattgttagacattttctcattttgaaatatttgtgtgtttgtgtatgtgctctgtgccatggctggtgtatatatgtgcaatgttagaaggcaaaagagtgatggtaggcagagggcaaagtcattgaatctcttatgccagttttcataaaacccaaaccacatatgaaaaaatccattaagggtccaagaagtctgtccatatgaaaatgagggtaaatatagtttatttcccaggtatcagtcattataattgatataatagctctaacatgcaatataaaattcataggagtattaatagcccatttacacatctataaaatgtaatgggattgcagagctgcagagtacagtgtaacagtactctcatgcaatttttttcaggatgcaaaggcaattattctttgtaagcgggacatttagaatatatttgtgtacatattatatgtatgtatatttcaaagtaccacactgaaaattagacatttattaaccaaatttaacgtggtatttaaaggtaatatttttaatatgatacattacatattgtgaatgtatactaaaaaaacattttaaatgttaaaattataatttcagattcatataaccacaactgtgatatatcctaactataaccagttgttgaggggtatactagaagcagaatgaaaccacattttttggtttgataatatgcacttattgactcccactcattgttatgttaattaagttattattctgtctccttgtaattttgattacaaaaattttattatcctgagttagctgttacttttacagtacctgatactcctaaaacttttaacttatacaaattagtcaataatgaccccaattttttcattaaaataatagtggtgaattatatgttattgtgttaaaacctcacttgccaaattctggcttcacatttgtatttagggctatccttaaaatgatgagtctatattatctagctttctattaccctaatataaactggtataagaagactttccttttttctttatgcatggaagcatcaataaattgtttaaaaaccatgtatagtaaattcagcttaacccgtgatcttcttaagttaaaggtacttttgttttataaaagctctagataaaactttcttttctgatcatgaatcaagtatctgtggtttcatgcccctctctatacctttcaaagaactcctgaagcaacttaactcatcatttcagcctctgagtagaggtaaaacctatgtgtacttctgtttatgatccatattgatatttatgacatgaacacagaatagtaccttacatttgctaaacagacagttaatatcaaatcctttcaatattctgggaacccagggaagtttttaaaaatgtcattactttcaaaggaacagaagtagttaaccaaactaacaagcaaaacctgaggtttacctagtgacaccaaattatcggtattttaactgaatttacccattgactaagaatgaaccagatttggtggtggttttgtttctatgcaaactggacacaaattacaacagtaaatttttttataagtgcttctcccttctccatgatgtgacttccggagataaaggattcaaaagataaagacaaagtacgctcagagttgttaaccagaaagtcctggctgtggttgcagaaacactgttggaagaaaagagatgactaagtcaagtgtctgccttatcaaaagagcaaaaatgcctctggttttgtgtttgggagaaaagtatcttggacgcactgttttccttgataaaagtcatcttctctactgtgtgaaatgaatacttggaattctaattgttttgtgtgccaggggcagtaatgtccctgcctcttctcccaatcaaggttgaggagtggggctggggagaggacttaactgacttaagaagtaggaaaacaaaaacctctctcctcagccttccacctccaagagaggaggaaaaacagttgtctgctgtctgtaattcagtttgcgtgtattttatgctcatgcaccaacccatacagagtaaatcttttatcaactgtatactggtgtttaatagagaatgattgtcttccgagttttttggttccttttttaactgtgttaaagtacttgaaatgtattgactgctgactatattttaaaaacaaaatgaaataatttgagttgtattacagaggttgacattgttcagggatgggacaaagccttcttcaatccttttcatactacttaatgattttggtgcaggaacctgagattttctgatttatatttcatgatatttcacatttgctcttcacagcatgagcatgaagcccagtggcaccaaatggctgggtacaatcaagtgatattttgtagcacctcactatctgaaaggccatgagttttcagatgatttcattgagcttcattgcagcctgaaattttaaaaaagttgtgtaatacgccaaccagtcaagttgtgttttggccagagatttagatatgtccaatttcctggctcatttcattgtgctctatgggtacgtataaaaagcaagaattctgtttcctaggcaaacattgcaactcagggctaaagtcatccagtgaaacttttagagccagaagtaactttgtcccagtcctacaatgtgaaaagagtgaatagttgcctctttttagccattttcatggctggtacatattcgtacgcattacttttcagaatcaatacgcactttcagatattcttatttttattctcttaagtctttattaactttggagagagaaatgatgcatctttttattttaaatgaagtagatcaacatggtggaacaaaatgataaagaacagaaaacatttcaatatattactaataactttttccaatataaatcctaaaattcctataacatagtattttacagttttatgaagctttctattgtgacttttatggaattaagagatgaagaagatgagatattttagcatttatatttttcaaaattatatgtatacttaaaaataaagtaactttatgca

SEQ ID NO: 793 - DNA, 7716 bp, Artificial Sequence
  Full mRNA polynucleotide sequence of SLC4A4
ggcggcgcgccgggcagcgcttcggtggcggcggcggccgcggtggcagcgaaggcggcggcggcggcggcagtggcagtggccgctgcagccccacactccgccgccaaactggaggagcgacggaagccagaccccaggaggatggaggatgaagctgtcctggacagaggggcttccttcctcaagcatgtgtgtgatgaagaagaagtagaaggccaccataccatttacatcggagtccatgtgccgaagagttacaggagaaggagacgtcacaagagaaagacagggcacaaagaaaagaaggaaaaggagagaatctctgagaactactctgacaaatcagatattgaaaatgctgatgaatccagcagcagcatcctaaaacctctcatctctcctgctgcagaacgcatccgattcatcttgggagaggaggatgacagcccagctccccctcagctcttcacggaactggatgagctgctggccgtggatgggcaggagatggagtggaaggaaacagccaggtggatcaagtttgaagaaaaagtggaacagggtggggaaagatggagcaagccccatgtggccacattgtcccttcatagtttatttgagctgaggacatgtatggagaaaggatccatcatgcttgatcgggaggcttcttctctcccacagttggtggagatgattgttgaccatcagattgagacaggcctattgaaacctgaacttaaggataaggtgacctatactttgctccggaagcaccggcatcaaaccaagaaatccaaccttcggtccctggctgacattgggaagacagtctccagtgcaagtaggatgtttaccaaccctgataatggtagcccagccatgacccataggaatctgacttcctccagtctgaatgacatttctgataaaccggagaaggaccagctgaagaataagttcatgaaaaaattgccacgtgatgcagaagcttccaacgtgcttgttggggaggttgactttttggatactcctttcattgcctttgttaggctacagcaggctgtcatgctgggtgccctgactgaagttcctgtgcccacaaggttcttgttcattctcttaggtcctaaggggaaagccaagtcctaccacgagattggcagagccattgccaccctgatgtctgatgaggtgttccatgacattgcttataaagcaaaagacaggcacgacctgattgctggtattgatgagttcctagatgaagtcatcgtccttccacctggggaatgggatccagcaattaggatagagcctcctaagagtcttccatcctctgacaaaagaaagaatatgtactcaggtggagagaatgttcagatgaatggggatacgccccatgatggaggtcacggaggaggaggacatggggattgtgaagaattgcagcgaactggacggttctgtggtggactaattaaagacataaagaggaaagcgccattttttgccagtgatttttatgatgctttaaatattcaagctctttcggcaattctcttcatttatctggcaactgtaactaatgctatcacttttggaggactgcttggggatgccactgacaacatgcagggcgtgttggagagtttcctgggcactgctgtctctggagccatcttttgcctttttgctggtcaaccactcactattctgagcagcaccggacctgtcctagtttttgagaggcttctatttaatttcagcaaggacaataattttgactatttggagtttcgcctttggattggcctgtggtccgccttcctatgtctcattttggtagccactgatgccagcttcttggttcaatacttcacacgtttcacggaggagggcttttcctctctgattagcttcatctttatctatgatgctttcaagaagatgatcaagcttgcagattactaccccatcaactccaacttcaaagtgggctacaacactctcttttcctgtacctgtgtgccacctgacccagctaatatctcaatatctaatgacaccacactggccccagagtatttgccaactatgtcttctactgacatgtaccataatactacctttgactgggcatttttgtcgaagaaggagtgttcaaaatacggaggaaacctcgtcgggaacaactgtaattttgttcctgatatcacactcatgtcttttatcctcttcttgggaacctacacctcttccatggctctgaaaaaattcaaaactagtccttattttccaaccacagcaagaaaactgatcagtgattttgccattatcttgtccattctcatcttttgtgtaatagatgccctagtaggcgtggacaccccaaaactaattgtgccaagtgagttcaagccaacaagtccaaaccgaggttggttcgttccaccgtttggagaaaacccctggtgggtgtgccttgctgctgctatcccggctttgttggtcactatactgattttcatggaccaacaaattacagctgtgattgtaaacaggaaagaacataaactcaagaaaggagcagggtatcacttggatctcttttgggtggccatcctcatggttatatgctccctcatggctcttccgtggtatgtagctgctacggtcatctccattgctcacatcgacagtttgaagatggagacagagacttctgcacctggagaacaaccaaagtttctaggagtgagggaacaaagagtcactggaacccttgtgtttattctgactggtctgtcagtctttatggctcccatcttgaagtttatacccatgcctgtactctatggtgtgttcctgtatatgggagtagcatcccttaatggtgtgcagttcatggatcgtctgaagctgcttctgatgcctctgaagcatcagcctgacttcatctacctgcgtcatgttcctctgcgcagagtccacctgttcactttcctgcaggtgttgtgtctggccctgctttggatcctcaagtcaacggtggctgctatcatttttccagtaatgatcttggcacttgtagctgtcagaaaaggcatggactacctcttctcccagcacgacctcagcttcctggatgatgtcattccagaaaaggacaagaaaaagaaggaggatgagaagaaaaagaaaaagaagaagggaagtctggacagtgacaatgatgattctgactgcccatactcagaaaaagttccaagtattaaaattccaatggacatcatggaacagcaacctttcctaagcgatagcaaaccttctgacagagaaagatcaccaacattccttgaacgccacacatcatgctgataaaattcctttccttcagtcactcggtatgccaagtcctcctagaactccagtaaaagttgtgcctcaaattagaatagaacttgaacctgaagacaatgattatttctggaggagcaagggaacagaaactacattgtaacctgtttgtctttcttaaaactgacatttgttgttaatgtcatttgtttttgtttggctgtttgtttattttttaacttttatttcgtctcagtttttggtcacaggccaaataatacagcgctctctctgcttctctcttgcatagacacaatcaagacaatagtgcaccgttccttaaaaacagcatctgaggaatcccccttttgttcttaaactttcagatgtgtcctttgataaccaaattctgtcactcaagacacagacacgcacagaccctgtcctttgcctctattaagcagaggatggaagtattaaggattttgtaacaccttttatgaaaatgttgaaggaacttaaaactttagctttggagctgtgcttactggcttgtctttgtctggtagaacaaaccttgacctccagacagagtcccttctcacttatagagctctccaggactggaaaaagtgctgctattttaacttgctcttgcttgtaaatcctaatcttagagttatcaaaagaagaaaaaactgaaggtactttactccctatagagaaaccattgccatcattgtagcaagtgctggaatgtcccttttttcctatgcaactttttttaaccctttaatgaacttatctgttgagtacattgaagaatatttttcttcctagattttgttgtttaaattatggggcctaacctgccacttattttttgtcaatttttaaaacttttttttaattactgtaaagaaaatgaattttttcctgcagcaggaaacatagttttgagtagttctacctcttatttgtagctgccaggctttctgtaaaaattgtattgtatataatgtgatttttacacatacatacacacacaaatacacaatctctagggtaagccagaaggcaagatcagattaaaaacaccatgtttctaagcatccatttttccctttctttaaaagaaacttaactgttctatgaaggagattgagggagaagagacaaactcctatgtcatgagaataaccgatgttctgataatagtagcatctaggtacagatgctggttgtattaccacgtcaatgtcctatgcagtattgttagacattttctcattttgaaatatttgtgtgtttgtgtatgtgctctgtgccatggctggtgtatatatgtgcaatgttagaaggcaaaagagtgatggtaggcagagggcaaagtcattgaatctcttatgccagttttcataaaacccaaaccacatatgaaaaaatccattaagggtccaagaagtctgtccatatgaaaatgagggtaaatatagtttatttcccaggtatcagtcattataattgatataatagctctaacatgcaatataaaattcataggagtattaatagcccatttacacatctataaaatgtaatgggattgcagagctgcagagtacagtgtaacagtactctcatgcaatttttttcaggatgcaaaggcaattattctttgtaagcgggacatttagaatatatttgtgtacatattatatgtatgtatatttcaaagtaccacactgaaaattagacatttattaaccaaatttaacgtggtatttaaaggtaatatttttaatatgatacattacatattgtgaatgtatactaaaaaaacattttaaatgttaaaattataatttcagattcatataaccacaactgtgatatatcctaactataaccagttgttgaggggtatactagaagcagaatgaaaccacattttttggtttgataatatgcacttattgactcccactcattgttatgttaattaagttattattctgtctccttgtaattttgattacaaaaattttattatcctgagttagctgttacttttacagtacctgatactcctaaaacttttaacttatacaaattagtcaataatgaccccaattttttcattaaaataatagtggtgaattatatgttattgtgttaaaacctcacttgccaaattctggcttcacatttgtatttagggctatccttaaaatgatgagtctatattatctagctttctattaccctaatataaactggtataagaagactttccttttttctttatgcatggaagcatcaataaattgtttaaaaaccatgtatagtaaattcagcttaacccgtgatcttcttaagttaaaggtacttttgttttataaaagctctagataaaactttcttttctgatcatgaatcaagtatctgtggtttcatgcccctctctatacctttcaaagaactcctgaagcaacttaactcatcatttcagcctctgagtagaggtaaaacctatgtgtacttctgtttatgatccatattgatatttatgacatgaacacagaatagtaccttacatttgctaaacagacagttaatatcaaatcctttcaatattctgggaacccagggaagtttttaaaaatgtcattactttcaaaggaacagaagtagttaaccaaactaacaagcaaaacctgaggtttacctagtgacaccaaattatcggtattttaactgaatttacccattgactaagaatgaaccagatttggtggtggttttgtttctatgcaaactggacacaaattacaacagtaaatttttttataagtgcttctcccttctccatgatgtgacttccggagataaaggattcaaaagataaagacaaagtacgctcagagttgttaaccagaaagtcctggctgtggttgcagaaacactgttggaagaaaagagatgactaagtcaagtgtctgccttatcaaaagagcaaaaatgcctctggttttgtgtttgggagaaaagtatcttggacgcactgttttccttgataaaagtcatcttctctactgtgtgaaatgaatacttggaattctaattgttttgtgtgccaggggcagtaatgtccctgcctcttctcccaatcaaggttgaggagtggggctggggagaggacttaactgacttaagaagtaggaaaacaaaaacctctctcctcagccttccacctccaagagaggaggaaaaacagttgtctgctgtctgtaattcagtttgcgtgtattttatgctcatgcaccaacccatacagagtaaatcttttatcaactgtatactggtgtttaatagagaatgattgtcttccgagttttttggttccttttttaactgtgttaaagtacttgaaatgtattgactgctgactatattttaaaaacaaaatgaaataatttgagttgtattacagaggttgacattgttcagggatgggacaaagccttcttcaatccttttcatactacttaatgattttggtgcaggaacctgagattttctgatttatatttcatgatatttcacatttgctcttcacagcatgagcatgaagcccagtggcaccaaatggctgggtacaatcaagtgatattttgtagcacctcactatctgaaaggccatgagttttcagatgatttcattgagcttcattgcagcctgaaattttaaaaaagttgtgtaatacgccaaccagtcaagttgtgttttggccagagatttagatatgtccaatttcctggctcatttcattgtgctctatgggtacgtataaaaagcaagaattctgtttcctaggcaaacattgcaactcagggctaaagtcatccagtgaaacttttagagccagaagtaactttgtcccagtcctacaatgtgaaaagagtgaatagttgcctctttttagccattttcatggctggtacatattcgtacgcattacttttcagaatcaatacgcactttcagatattcttatttttattctcttaagtctttattaactttggagagagaaatgatgcatctttttattttaaatgaagtagatcaacatggtggaacaaaatgataaagaacagaaaacatttcaatatattactaataactttttccaatataaatcctaaaattcctataacatagtattttacagttttatgaagctttctattgtgacttttatggaattaagagatgaagaagatgagatattttagcatttatatttttcaaaattatatgtatacttaaaaataaagtaactttatgca

SEQ ID NO: 794 - protein, 24 aa, Homo sapiens
MEDEAVLDRGASFLKHVCDEEEVE

SEQ ID NO: 795 - protein, 59 aa, Homo sapiens
HHTIYIGVHVPKSYRRRRRHKRKTGHKEKKEKERISENYSDKSDIENADESSSSILKPL

SEQ ID NO: 796 - protein, 44 aa, Homo sapiens
SPAAERIRFILGEEDDSPAPPQLFTELDELLAVDGQEMEWKETA

SEQ ID NO: 797 - protein, 53 aa, Homo sapiens
WIKFEEKVEQGGERWSKPHVATLSLHSLFELRTCMEKGSIMLDREASSLPQLV

SEQ ID NO: 798 - protein, 59 aa, Homo sapiens
MIVDHQIETGLLKPELKDKVTYTLLRKHRHQTKKSNLRSLADIGKTVSSASRMFTNPDN

SEQ ID NO: 799 - protein, 25 aa, Homo sapiens
SPAMTHRNLTSSSLNDISDKPEKDQ

SEQ ID NO: 800 - protein, 52 aa, Homo sapiens
LKNKFMKKLPRDAEASNVLVGEVDFLDTPFIAFVRLQQAVMLGALTEVPVPT

SEQ ID NO: 801 - protein, 29 aa, Homo sapiens
FLFILLGPKGKAKSYHEIGRAIATLMSDE

SEQ ID NO: 802 - protein, 51 aa, Homo sapiens
VFHDIAYKAKDRHDLIAGIDEFLDEVIVLPPGEWDPAIRIEPPKSLPSSDK

SEQ ID NO: 803 - protein, 37 aa, Homo sapiens
KNMYSGGENVQMNGDTPHDGGHGGGGHGDCEELQRTG

SEQ ID NO: 804 - protein, 58 aa, Homo sapiens
FCGGLIKDIKRKAPFFASDFYDALNIQALSAILFIYLATVTNAITFGGLLGDATDNMQ

SEQ ID NO: 805 - protein, 44 aa, Homo sapiens
GVLESFLGTAVSGAIFCLFAGQPLTILSSTGPVLVFERLLFNFS

SEQ ID NO: 806 - protein, 90 aa, Homo sapiens
DNNFDYLEFRLWIGLWSAFLCLILVATDASFLVQYFTRFTEEGFSSLISFIFIYDAFKKMIKLADYYPINSNFKVGYNTLFSCTCVPPDP

SEQ ID NO: 807 - protein, 23 aa, Homo sapiens
NISISNDTTLAPEYLPTMSSTDM

SEQ ID NO: 808 - protein, 64 aa, Homo sapiens
YHNTTFDWAFLSKKECSKYGGNLVGNNCNFVPDITLMSFILFLGTYTSSMALKKFKTSPYFPTT

SEQ ID NO: 809 - protein, 38 aa, Homo sapiens
ARKLISDFAIILSILIFCVIDALVGVDTPKLIVPSEFK

SEQ ID NO: 810 - protein, 54 aa, Homo sapiens
PTSPNRGWFVPPFGENPWWVCLAAAIPALLVTILIFMDQQITAVIVNRKEHKLK

SEQ ID NO: 811 - protein, 59 aa, Homo sapiens
KGAGYHLDLFWVAILMVICSLMALPWYVAATVISIAHIDSLKMETETSAPGEQPKFLGV

SEQ ID NO: 812 - protein, 24 aa, Homo sapiens
EQRVTGTLVFILTGLSVFMAPILK

SEQ ID NO: 813 - protein, 23 aa, Homo sapiens
FIPMPVLYGVFLYMGVASLNGVQ

SEQ ID NO: 814 - protein, 58 aa, Homo sapiens
FMDRLKLLLMPLKHQPDFIYLRHVPLRRVHLFTFLQVLCLALLWILKSTVAAIIFPVM

SEQ ID NO: 815 - protein, 54 aa, Homo sapiens
ILALVAVRKGMDYLFSQHDLSFLDDVIPEKDKKKKEDEKKKKKKKGSLDSDNDD

SEQ ID NO: 816 - protein, 32 aa, Homo sapiens
SDCPYSEKVPSIKIPMDIMEQQPFLSDSKPSD

SEQ ID NO: 817 - protein, 13 aa, Homo sapiens
ERSPTFLERHTSC

SEQ ID NO: 818 - skipped

SEQ ID NO: 819 - protein, 1079 aa, Homo sapiens
MEDEAVLDRGASFLKHVCDEEEVEGHHTIYIGVHVPKSYRRRRRHKRKTGHKEKKEKERISENYSDKSDIENADESSSSILKPLISPAAERIRFILGEEDDSPAPPQLFTELDELLAVDGQEMEWKETARWIKFEEKVEQGGERWSKPHVATLSLHSLFELRTCMEKGSIMLDREASSLPQLVEMIVDHQIETGLLKPELKDKVTYTLLRKHRHQTKKSNLRSLADIGKTVSSASRMFTNPDNGSPAMTHRNLTSSSLNDISDKPEKDQLKNKFMKKLPRDAEASNVLVGEVDFLDTPFIAFVRLQQAVMLGALTEVPVPTRFLFILLGPKGKAKSYHEIGRAIATLMSDEVFHDIAYKAKDRHDLIAGIDEFLDEVIVLPPGEWDPAIRIEPPKSLPSSDKRKNMYSGGENVQMNGDTPHDGGHGGGGHGDCEELQRTGRFCGGLIKDIKRKAPFFASDFYDALNIQALSAILFIYLATVTNAITFGGLLGDATDNMQGVLESFLGTAVSGAIFCLFAGQPLTILSSTGPVLVFERLLFNFSKDNNFDYLEFRLWIGLWSAFLCLILVATDASFLVQYFTRFTEEGFSSLISFIFIYDAFKKMIKLADYYPINSNFKVGYNTLFSCTCVPPDPANISISNDTTLAPEYLPTMSSTDMYHNTTFDWAFLSKKECSKYGGNLVGNNCNFVPDITLMSFILFLGTYTSSMALKKFKTSPYFPTTARKLISDFAIILSILIFCVIDALVGVDTPKLIVPSEFKPTSPNRGWFVPPFGENPWWVCLAAAIPALLVTILIFMDQQITAVIVNRKEHKLKKGAGYHLDLFWVAILMVICSLMALPWYVAATVISIAHIDSLKMETETSAPGEQPKFLGVREQRVTGTLVFILTGLSVFMAPILKFIPMPVLYGVFLYMGVASLNGVQFMDRLKLLLMPLKHQPDFIYLRHVPLRRVHLFTFLQVLCLALLWILKSTVAAIIFPVMILALVAVRKGMDYLFSQHDLSFLDDVIPEKDKKKKEDEKKKKKKKGSLDSDNDDSDCPYSEKVPSIKIPMDIMEQQPFLSDSKPSDRERSPTFLERHTSC

SEQ ID NO: 820 - DNA, 2047 bp, Homo sapiens
ggcggcgcgccgggcagcgcttcggtggcggcggcggccgcggtggcagcgaaggcggcggcggcggcggcagtggcagtggccgctgcagccccacactccgccgccaaactggaggagcgacggaagccagaccccaggaggatggaggatgaagctgtcctggacagaggggcttccttcctcaagcatgtgtgtgatgaagaagaagtagaaggccaccataccatttacatcggagtccatgtgccgaagagttacaggagaaggagacgtcacaagagaaagacagggcacaaagaaaagaaggaaaaggagagaatctctgagaactactctgacaaatcagatattgaaaatgctgatgaatccagcagcagcatcctaaaacctctcatctctcctgctgcagaacgcatccgattcatcttgggagaggaggatgacagcccagctccccctcagctcttcacggaactggatgagctgctggccgtggatgggcaggagatggagtggaaggaaacagccaggtggatcaagtttgaagaaaaagtggaacagggtggggaaagatggagcaagccccatgtggccacattgtcccttcatagtttatttgagctgaggacatgtatggagaaaggatccatcatgcttgatcgggaggcttcttctctcccacagttggtggagatgattgttgaccatcagattgagacaggcctattgaaacctgaacttaaggataaggtgacctatactttgctccggaagcaccggcatcaaaccaagaaatccaaccttcggtccctggctgacattgggaagacagtctccagtgcaagtaggatgtttaccaaccctgataatggtagcccagccatgacccataggaatctgacttcctccagtctgaatgacatttctgataaaccggagaaggaccagctgaagaataagttcatgaaaaaattgccacgtgatgcagaagcttccaacgtgcttgttggggaggttgactttttggatactcctttcattgcctttgttaggctacagcaggctgtcatgctgggtgccctgactgaagttcctgtgcccacaaggttcttgttcattctcttaggtcctaaggggaaagccaagtcctaccacgagattggcagagccattgccaccctgatgtctgatgaggtgttccatgacattgcttataaagcaaaagacaggcacgacctgattgctggtattgatgagttcctagatgaagtcatcgtccttccacctggggaatgggatccagcaattaggatagagcctcctaagagtcttccatcctctgacaaaagaaagaatatgtactcaggtggagagaatgttcagatgaatggggatacgccccatgatggaggtcacggaggaggaggacatggggattgtgaagaattgcagcgaactggacggttctgtggtggactaattaaagacataaagaggaaagcgccattttttgccagtgatttttatgatgctttaaatattcaagctctttcggcaattctcttcatttatctggcaactgtaactaatgctatcacttttggaggactgcttggggatgccactgacaacatgcagggcgtgttggagagtttcctgggcactgctgtctctggagccatcttttgcctttttgctggtcaaccactcactattctgagcagcaccggacctgtcctagtttttgagaggcttctatttaatttcagcaaggacaataattttgactatttggagtttcgcctttggattggcctgtggtccgccttcctatgtctcattttggtagccactgatgccagcttcttggttcaatacttcacacgtttcacggaggagggcttttcctctctgattagcttcatctttatctatgatgctttcaagaagatgatcaagcttgcagattactaccccatcaactccaacttcaaagtgggctacaacactctcttttcctgtacctgtgtgccacctgacccag

SEQ ID NO: 821 - protein, 634 aa, Homo sapiens
MEDEAVLDRGASFLKHVCDEEEVEGHHTIYIGVHVPKSYRRRRRHKRKTGHKEKKEKERISENYSDKSDIENADESSSSILKPLISPAAERIRFILGEEDDSPAPPQLFTELDELLAVDGQEMEWKETARWIKFEEKVEQGGERWSKPHVATLSLHSLFELRTCMEKGSIMLDREASSLPQLVEMIVDHQIETGLLKPELKDKVTYTLLRKHRHQTKKSNLRSLADIGKTVSSASRMFTNPDNGSPAMTHRNLTSSSLNDISDKPEKDQLKNKFMKKLPRDAEASNVLVGEVDFLDTPFIAFVRLQQAVMLGALTEVPVPTRFLFILLGPKGKAKSYHEIGRAIATLMSDEVFHDIAYKAKDRHDLIAGIDEFLDEVIVLPPGEWDPAIRIEPPKSLPSSDKRKNMYSGGENVQMNGDTPHDGGHGGGGHGDCEELQRTGRFCGGLIKDIKRKAPFFASDFYDALNIQALSAILFIYLATVTNAITFGGLLGDATDNMQGVLESFLGTAVSGAIFCLFAGQPLTILSSTGPVLVFERLLFNFSKDNNFDYLEFRLWIGLWSAFLCLILVATDASFLVQYFTRFTEEGFSSLISFIFIYDAFKKMIKLADYYPINSNFKVGYNTLFSCTCVPPDP

SEQ ID NO: 822 - DNA, 75 bp, Homo sapiens
atgtgtccaacaaggtgtcaatgtccagcactgtgcagggcagcaacatctttgagagaacggaggtcctggcag

SEQ ID NO: 823 - DNA, 75 bp, Homo sapiens; identical to SEQ ID NO: 634

SEQ ID NO: 824 - DNA, 150 bp, Homo sapiens
atgtgtccaacaaggtgtcaatgtccagcactgtgcagggcagcaacatctttgagagaacggaggtcctggcagccttgcctccccgattgaaagagatgaaaagccaggaatcggctgcaggttccaaactagtccttcggtgtgaaa

SEQ ID NO: 825 - protein, 49 aa, Homo sapiens
VSNKVSMSSTVQGSNIFERTEVLAALPPRLKEMKSQESAAGSKLVLRCE

SEQ ID NO: 826 - DNA, 75 bp, Homo sapiens
acaggaagcaccctaatgaggagtatgccaacgtgggcaccggggagctggcagcggaggtgctcatccagcaag

SEQ ID NO: 827 - DNA, 75 bp, Homo sapiens; identical to SEQ ID NO: 692

SEQ ID NO: 828 - DNA, 150 bp, Homo sapiens
acaggaagcaccctaatgaggagtatgccaacgtgggcaccggggagctggcagcggaggtgctcatccagcaagctacatctacatccaccactgggacaagccatcttgtaaaatgtgcggagaaggagaaaactttctgtgtgaatg

SEQ ID NO: 829 - protein, 49 aa, Homo sapiens
RKHPNEEYANVGTGELAAEVLIQQATSTSTTGTSHLVKCAEKEKTFCVN

SEQ ID NO: 830 - DNA, 187 bp, Homo sapiens
atccgccatgttggatgccgcagattcgccataacctcgccggctcttttcttaaaaaaataaaaataaaaagcgaagcgtcagcagggcgccccgccccctcggtcggcacgggagggggcccggaagagcccgaggcttttttttcctccgcggtggggcgttgccatggagacgcgggcggcag

SEQ ID NO: 831 - DNA, 177 bp, Homo sapiens
aaaacacggccatctttatgtgtaaatgttgtaacctcttctcaccaaatcagtcggaactcctctcccacgtttcagagaagcacatggaagaaggggttaatgttgatgagattattattccccttaggcctctgagtacacctgaaccccccaactcaagcaaaaccggagatg

SEQ ID NO: 832 - DNA, 252 bp, Homo sapiens
agtttttggtcatgaagaggaagagaggcaggcctaaggggtccacgaagaagtccagcacagaagaggagctggcagaaaacatcgtgagtccgactgaggacagcccgctggctccggaggaagggaacagcctgcctccaagcagcttggagtgtagcaagtgctgtcggaagttctccaacacgcgccagctgcggaagcacatctgcattatcgtgctgaatttgggtgaggaggaaggagaagcag

SEQ ID NO: 833 - DNA, 186 bp, Homo sapiens
gtaacgagtctgaccttgaactagaaaagaagtgtaaggaagatgatcgggaaaaagcctcgaaaagaccacggtcacagaaaacagagaaagtccagaagatctcaggaaaggaggccagacagctttctggggcgaagaaacccatcataagtgtggttttaactgcacacgaagcaattccag

SEQ ID NO: 834 - DNA, 151 bp, Homo sapiens
gtgctaccaagattgtgccagtggaggctgggccccctgaaacaggagctacaaattctgagaccacttcagcagacctggtgcctcggagaggctaccaggaatacgccattcagcagacaccttatgagcaaccaatgaagtcaagcag

SEQ ID NO: 835 - DNA, 1457 bp, Homo sapiens
gctaggtcccactcagctcaaaatcttcacttgtgaatactgcaacaaggtcttcaagttcaagcactcgctgcaggcccacctgaggatccacaccaatgaaaagccatacaagtgcccccagtgcagctatgccagtgccatcaaggccaacctcaatgtgcacctgcgcaagcacactggagagaagttcgcctgcgactattgctcgttcacctgcctgagcaagggccacctcaaggtgcacatcgagcgagtgcacaagaagatcaagcagcactgccgcttctgcaagaagaagtactctgacgtcaagaacctcatcaagcacatccgagacgcgcatgacccacaggacaagaaggtcaaagaggccttggacgagctctgcctgatgacgagggagggcaagcggcagctgctctatgactgccacatctgtgagcgcaagttcaagaacgagctggaccgtgaccgccatatgctggtccacggagacaagtggccttttgcctgtgagctctgtggccatggggccaccaagtaccaggcgctggaactgcatgtcaggaagcaccccttcgtgtacgtctgtgccgtctgccgcaagaagttcgtcagctccatcaggctgcgcacccacatcaaagaggtgcacggggctgcccaggaggccttggtcttcaccagttccatcaaccagagcttctgcctcctggaacctggtggggacatccagcaagaagctctgggggaccagctacagctggtggaagaggagtttgccctccagggcgtgaatgcactcaaggaagaggcctgtcctggggacactcagctggaggagggccggaaggagccggaggcccctggggaaatgcctgccccagctgtgcacctggcctccccgcaggccgaaagcacagccctgccaccctgtgagctggaaaccaccgtggtctcctcctcagacctgcattctcaagaggtggtttcagatgattttttgttgaaaaatgatacctcctccgcagaggctcatgctgctcctgagaagcccccagacatgcagcacagaagctcagtccagacgcaaggtgaagtgatcacactactgctgtccaaggcccagagtgctgggtcagatcaggaaagccatggcgcccagagccccctaggggaagggcagaacatggctgtgctttcagctggtgacccagatcccagcaggtgtctcaggtcaaacccagctgaggcctcagacctcctccctccagtagctggtggtggggacaccatcacacatcagcctgactcttgcaaagctgcccctgagcaccggtcaggcatcaccgctttcatgaaggtcctgaacagtttacagaagaagcaaatgaacaccagcttgtgtgagcggatccggaaggtttatggagacctggagtgtgaatactgtg

SEQ ID NO: 836 - DNA, 233 bp, Homo sapiens
gcaaacttttttggtaccaagtgcattttgatatgcatgtccgcacccacacccgggaacatctgtattattgctctcagtgtcattattcttccatcaccaaaaactgccttaaacgccacgtaattcagaaacacagtaacatcttgctgaagtgtcccaccgatggctgtgactactcaactccagataaatataagctacaggcacatcttaaagttcacacagcactg

SEQ ID NO: 837 - DNA, 88 bp, Homo sapiens
gacaaaaggagttattcttgtcctgtttgtgaaaagtctttttcagaggatcgattgataaagtcacatatcaagaccaaccatcctg

SEQ ID NO: 838 - DNA, 150 bp, Homo sapiens
aggtctccatgagcaccatttctgaggttctcgggaggagggttcagctgaaagggctaattggaaagagagccatgaaatgcccatattgtgacttttatttcatgaagaatggctcagaccttcagcgtcatatttgggctcatgaag

SEQ ID NO: 839 - DNA, 174 bp, Homo sapiens
gtgtgaagcccttcaagtgttctttgtgtgagtatgcaactcgtagcaagagtaacctcaaggctcatatgaatcgtcacagcactgagaaaacccacctatgtgacatgtgtggcaagaaattcaaatcaaaagggacactgaaaagtcacaaactccttcacactgcagatg

SEQ ID NO: 840 - DNA, 89 bp, Homo sapiens
ggaagcagtttaagtgcacggtgtgtgactacacagcggcccagaagccacagctgctgcggcacatggaacagcatgtctccttcaag

SEQ ID NO: 841 - DNA, 139 bp, Homo sapiens
cctttccgctgtgcccattgccattactcctgcaacatatctggctctctgaagcggcactacaacaggaagcaccctaatgaggagtatgccaacgtgggcaccggggagctggcagcggaggtgctcatccagcaag

SEQ ID NO: 842 - DNA, 119 bp, Homo sapiens
gtggtttgaagtgtcctgtttgcagctttgtatatggcaccaaatgggagttcaataggcacttgaagaacaaacatggcttgaaggtggtggaaattgatggagaccccaagtgggag

SEQ ID NO: 843 - DNA, 127 bp, Homo sapiens
acagcaacagaagctcctgaggagccctccacccagtatctccacatcacagaggccgaagaagacgttcaagggacacaggcagcggtggccgcgctccaggacctgagatacacctctgagagtg

SEQ ID NO: 844 - DNA, 131 bp, Homo sapiens
gcgaccgactggaccccacggccgtgaacatcctgcagcagatcattgagctgggcgccgagacccatgacgccactgcccttgcctcggtggttgccatggcaccagggacggtgactgtggttaagcag

SEQ ID NO: 845 - DNA, 934 bp, Homo sapiens
gtcaccgaggaggagcccagctccaaccacacggtcatgatccaggagacggtccagcaagcgtccgtggagcttgccgagcagcaccacctggtggtgtcctccgacgacgtggagggcattgagacggtgactgtctacacgcagggcggggaggcctcggagttcatcgtctacgtgcaggaggccatgcagcctgtggaggagcaggctgtggagcagccggcccaggaactctagaggacatgtggcatcggatggccacagggcggggctgccaggctctgcaggcacccagggtggggaggccacccttcctgccctacccgcagaatggtgctctcctttgccctccctgcccagcagcctgataggactctcctagtccaacttggggtgggcaaggcagtcagcatcaccagcaataccacaggaccctcaccccagcatagacacacaccccctgacccttaccatctgcttcctgaaagacttcagtgtcagctcccctacacacaccccacaccttcaccccttgcttcaagattcaaacagagactcccagtccccctcagcatcttccctgaatcacagccccagctccttgacccccatctaggtgccaaatgttcatctgcaaccgctatgcagtctggtgagagggagacagccatcacatagaaagtgaccgtacgggtttttaatcactgctgggtggggtgggggtagggggattgtcctggctttgtcgacaaagtcccacttccccgagtattaagggcccttggtatcaagtgaggtaaattcacccatcacagggtctcgccctaccatcctggaattatttcacttttaagataaatgcactatttcactgttcgcctcccattctaaggaggtgaggtggttggaataaaaacagttcctgtctgaa

SEQ ID NO: 846 - DNA, 4594 bp, Artificial Sequence
  Full mRNA polynucleotide sequence of ZFAT
atccgccatgttggatgccgcagattcgccataacctcgccggctcttttcttaaaaaaataaaaataaaaagcgaagcgtcagcagggcgccccgccccctcggtcggcacgggagggggcccggaagagcccgaggcttttttttcctccgcggtggggcgttgccatggagacgcgggcggcagaaaacacggccatctttatgtgtaaatgttgtaacctcttctcaccaaatcagtcggaactcctctcccacgtttcagagaagcacatggaagaaggggttaatgttgatgagattattattccccttaggcctctgagtacacctgaaccccccaactcaagcaaaaccggagatgagtttttggtcatgaagaggaagagaggcaggcctaaggggtccacgaagaagtccagcacagaagaggagctggcagaaaacatcgtgagtccgactgaggacagcccgctggctccggaggaagggaacagcctgcctccaagcagcttggagtgtagcaagtgctgtcggaagttctccaacacgcgccagctgcggaagcacatctgcattatcgtgctgaatttgggtgaggaggaaggagaagcaggtaacgagtctgaccttgaactagaaaagaagtgtaaggaagatgatcgggaaaaagcctcgaaaagaccacggtcacagaaaacagagaaagtccagaagatctcaggaaaggaggccagacagctttctggggcgaagaaacccatcataagtgtggttttaactgcacacgaagcaattccaggtgctaccaagattgtgccagtggaggctgggccccctgaaacaggagctacaaattctgagaccacttcagcagacctggtgcctcggagaggctaccaggaatacgccattcagcagacaccttatgagcaaccaatgaagtcaagcaggctaggtcccactcagctcaaaatcttcacttgtgaatactgcaacaaggtcttcaagttcaagcactcgctgcaggcccacctgaggatccacaccaatgaaaagccatacaagtgcccccagtgcagctatgccagtgccatcaaggccaacctcaatgtgcacctgcgcaagcacactggagagaagttcgcctgcgactattgctcgttcacctgcctgagcaagggccacctcaaggtgcacatcgagcgagtgcacaagaagatcaagcagcactgccgcttctgcaagaagaagtactctgacgtcaagaacctcatcaagcacatccgagacgcgcatgacccacaggacaagaaggtcaaagaggccttggacgagctctgcctgatgacgagggagggcaagcggcagctgctctatgactgccacatctgtgagcgcaagttcaagaacgagctggaccgtgaccgccatatgctggtccacggagacaagtggccttttgcctgtgagctctgtggccatggggccaccaagtaccaggcgctggaactgcatgtcaggaagcaccccttcgtgtacgtctgtgccgtctgccgcaagaagttcgtcagctccatcaggctgcgcacccacatcaaagaggtgcacggggctgcccaggaggccttggtcttcaccagttccatcaaccagagcttctgcctcctggaacctggtggggacatccagcaagaagctctgggggaccagctacagctggtggaagaggagtttgccctccagggcgtgaatgcactcaaggaagaggcctgtcctggggacactcagctggaggagggccggaaggagccggaggcccctggggaaatgcctgccccagctgtgcacctggcctccccgcaggccgaaagcacagccctgccaccctgtgagctggaaaccaccgtggtctcctcctcagacctgcattctcaagaggtggtttcagatgattttttgttgaaaaatgatacctcctccgcagaggctcatgctgctcctgagaagcccccagacatgcagcacagaagctcagtccagacgcaaggtgaagtgatcacactactgctgtccaaggcccagagtgctgggtcagatcaggaaagccatggcgcccagagccccctaggggaagggcagaacatggctgtgctttcagctggtgacccagatcccagcaggtgtctcaggtcaaacccagctgaggcctcagacctcctccctccagtagctggtggtggggacaccatcacacatcagcctgactcttgcaaagctgcccctgagcaccggtcaggcatcaccgctttcatgaaggtcctgaacagtttacagaagaagcaaatgaacaccagcttgtgtgagcggatccggaaggtttatggagacctggagtgtgaatactgtggcaaacttttttggtaccaagtgcattttgatatgcatgtccgcacccacacccgggaacatctgtattattgctctcagtgtcattattcttccatcaccaaaaactgccttaaacgccacgtaattcagaaacacagtaacatcttgctgaagtgtcccaccgatggctgtgactactcaactccagataaatataagctacaggcacatcttaaagttcacacagcactggacaaaaggagttattcttgtcctgtttgtgaaaagtctttttcagaggatcgattgataaagtcacatatcaagaccaaccatcctgaggtctccatgagcaccatttctgaggttctcgggaggagggttcagctgaaagggctaattggaaagagagccatgaaatgcccatattgtgacttttatttcatgaagaatggctcagaccttcagcgtcatatttgggctcatgaaggtgtgaagcccttcaagtgttctttgtgtgagtatgcaactcgtagcaagagtaacctcaaggctcatatgaatcgtcacagcactgagaaaacccacctatgtgacatgtgtggcaagaaattcaaatcaaaagggacactgaaaagtcacaaactccttcacactgcagatgggaagcagtttaagtgcacggtgtgtgactacacagcggcccagaagccacagctgctgcggcacatggaacagcatgtctccttcaagcctttccgctgtgcccattgccattactcctgcaacatatctggctctctgaagcggcactacaacaggaagcaccctaatgaggagtatgccaacgtgggcaccggggagctggcagcggaggtgctcatccagcaaggtggtttgaagtgtcctgtttgcagctttgtatatggcaccaaatgggagttcaataggcacttgaagaacaaacatggcttgaaggtggtggaaattgatggagaccccaagtgggagacagcaacagaagctcctgaggagccctccacccagtatctccacatcacagaggccgaagaagacgttcaagggacacaggcagcggtggccgcgctccaggacctgagatacacctctgagagtggcgaccgactggaccccacggccgtgaacatcctgcagcagatcattgagctgggcgccgagacccatgacgccactgcccttgcctcggtggttgccatggcaccagggacggtgactgtggttaagcaggtcaccgaggaggagcccagctccaaccacacggtcatgatccaggagacggtccagcaagcgtccgtggagcttgccgagcagcaccacctggtggtgtcctccgacgacgtggagggcattgagacggtgactgtctacacgcagggcggggaggcctcggagttcatcgtctacgtgcaggaggccatgcagcctgtggaggagcaggctgtggagcagccggcccaggaactctagaggacatgtggcatcggatggccacagggcggggctgccaggctctgcaggcacccagggtggggaggccacccttcctgccctacccgcagaatggtgctctcctttgccctccctgcccagcagcctgataggactctcctagtccaacttggggtgggcaaggcagtcagcatcaccagcaataccacaggaccctcaccccagcatagacacacaccccctgacccttaccatctgcttcctgaaagacttcagtgtcagctcccctacacacaccccacaccttcaccccttgcttcaagattcaaacagagactcccagtccccctcagcatcttccctgaatcacagccccagctccttgacccccatctaggtgccaaatgttcatctgcaaccgctatgcagtctggtgagagggagacagccatcacatagaaagtgaccgtacgggtttttaatcactgctgggtggggtgggggtagggggattgtcctggctttgtcgacaaagtcccacttccccgagtattaagggcccttggtatcaagtgaggtaaattcacccatcacagggtctcgccctaccatcctggaattatttcacttttaagataaatgcactatttcactgttcgcctcccattctaaggaggtgaggtggttggaataaaaacagttcctgtctgaa

SEQ ID NO: 847 - protein, 5 aa, Homo sapiens
METRA

SEQ ID NO: 848 - protein, 58 aa, Homo sapiens
NTAIFMCKCCNLFSPNQSELLSHVSEKHMEEGVNVDEIIIPLRPLSTPEPPNSSKTGD

SEQ ID NO: 849 - protein, 83 aa, Homo sapiens
FLVMKRKRGRPKGSTKKSSTEEELAENIVSPTEDSPLAPEEGNSLPPSSLECSKCCRKFSNTRQLRKHICIIVLNLGEEEGEA

SEQ ID NO: 850 - protein, 61 aa, Homo sapiens
NESDLELEKKCKEDDREKASKRPRSQKTEKVQKISGKEARQLSGAKKPIISVVLTAHEAIP

SEQ ID NO: 851 - protein, 49 aa, Homo sapiens
ATKIVPVEAGPPETGATNSETTSADLVPRRGYQEYAIQQTPYEQPMKSS

SEQ ID NO: 852 - protein, 485 aa, Homo sapiens
LGPTQLKIFTCEYCNKVFKFKHSLQAHLRIHTNEKPYKCPQCSYASAIKANLNVHLRKHTGEKFACDYCSFTCLSKGHLKVHIERVHKKIKQHCRFCKKKYSDVKNLIKHIRDAHDPQDKKVKEALDELCLMTREGKRQLLYDCHICERKFKNELDRDRHMLVHGDKWPFACELCGHGATKYQALELHVRKHPFVYVCAVCRKKFVSSIRLRTHIKEVHGAAQEALVFTSSINQSFCLLEPGGDIQQEALGDQLQLVEEEFALQGVNALKEEACPGDTQLEEGRKEPEAPGEMPAPAVHLASPQAESTALPPCELETTVVSSSDLHSQEVVSDDFLLKNDTSSAEAHAAPEKPPDMQHRSSVQTQGEVITLLLSKAQSAGSDQESHGAQSPLGEGQNMAVLSAGDPDPSRCLRSNPAEASDLLPPVAGGGDTITHQPDSCKAAPEHRSGITAFMKVLNSLQKKQMNTSLCERIRKVYGDLECEYC

SEQ ID NO: 853 - protein, 77 aa, Homo sapiens
KLFWYQVHFDMHVRTHTREHLYYCSQCHYSSITKNCLKRHVIQKHSNILLKCPTDGCDYSTPDKYKLQAHLKVHTAL

SEQ ID NO: 854 - protein, 29 aa, Homo sapiens
DKRSYSCPVCEKSFSEDRLIKSHIKTNHP

SEQ ID NO: 855 - protein, 49 aa, Homo sapiens
VSMSTISEVLGRRVQLKGLIGKRAMKCPYCDFYFMKNGSDLQRHIWAHE

SEQ ID NO: 856 - protein, 57 aa, Homo sapiens
VKPFKCSLCEYATRSKSNLKAHMNRHSTEKTHLCDMCGKKFKSKGTLKSHKLLHTAD

SEQ ID NO: 857 - protein, 29 aa, Homo sapiens
KQFKCTVCDYTAAQKPQLLRHMEQHVSFK

SEQ ID NO: 858 - protein, 46 aa, Homo sapiens
PFRCAHCHYSCNISGSLKRHYNRKHPNEEYANVGTGELAAEVLIQQ

SEQ ID NO: 859 - protein, 39 aa, Homo sapiens
GLKCPVCSFVYGTKWEFNRHLKNKHGLKVVEIDGDPKWE

SEQ ID NO: 860 - protein, 42 aa, Homo sapiens
TATEAPEEPSTQYLHITEAEEDVQGTQAAVAALQDLRYTSES

SEQ ID NO: 861 - protein, 43 aa, Homo sapiens
DRLDPTAVNILQQIIELGAETHDATALASVVAMAPGTVTVVKQ

SEQ ID NO: 862 - protein, 79 aa, Homo sapiens
VTEEEPSSNHTVMIQETVQQASVELAEQHHLVVSSDDVEGIETVTVYTQGGEASEFIVYVQEAMQPVEEQAVEQPAQEL

SEQ ID NO: 863 - protein, 1243 aa, Homo sapiens
METRAAENTAIFMCKCCNLFSPNQSELLSHVSEKHMEEGVNVDEIIIPLRPLSTPEPPNSSKTGDEFLVMKRKRGRPKGSTKKSSTEEELAENIVSPTEDSPLAPEEGNSLPPSSLECSKCCRKFSNTRQLRKHICIIVLNLGEEEGEAGNESDLELEKKCKEDDREKASKRPRSQKTEKVQKISGKEARQLSGAKKPIISVVLTAHEAIPGATKIVPVEAGPPETGATNSETTSADLVPRRGYQEYAIQQTPYEQPMKSSRLGPTQLKIFTCEYCNKVFKFKHSLQAHLRIHTNEKPYKCPQCSYASAIKANLNVHLRKHTGEKFACDYCSFTCLSKGHLKVHIERVHKKIKQHCRFCKKKYSDVKNLIKHIRDAHDPQDKKVKEALDELCLMTREGKRQLLYDCHICERKFKNELDRDRHMLVHGDKWPFACELCGHGATKYQALELHVRKHPFVYVCAVCRKKFVSSIRLRTHIKEVHGAAQEALVFTSSINQSFCLLEPGGDIQQEALGDQLQLVEEEFALQGVNALKEEACPGDTQLEEGRKEPEAPGEMPAPAVHLASPQAESTALPPCELETTVVSSSDLHSQEVVSDDFLLKNDTSSAEAHAAPEKPPDMQHRSSVQTQGEVITLLLSKAQSAGSDQESHGAQSPLGEGQNMAVLSAGDPDPSRCLRSNPAEASDLLPPVAGGGDTITHQPDSCKAAPEHRSGITAFMKVLNSLQKKQMNTSLCERIRKVYGDLECEYCGKLFWYQVHFDMHVRTHTREHLYYCSQCHYSSITKNCLKRHVIQKHSNILLKCPTDGCDYSTPDKYKLQAHLKVHTALDKRSYSCPVCEKSFSEDRLIKSHIKTNHPEVSMSTISEVLGRRVQLKGLIGKRAMKCPYCDFYFMKNGSDLQRHIWAHEGVKPFKCSLCEYATRSKSNLKAHMNRHSTEKTHLCDMCGKKFKSKGTLKSHKLLHTADGKQFKCTVCDYTAAQKPQLLRHMEQHVSFKPFRCAHCHYSCNISGSLKRHYNRKHPNEEYANVGTGELAAEVLIQQGGLKCPVCSFVYGTKWEFNRHLKNKHGLKVVEIDGDPKWETATEAPEEPSTQYLHITEAEEDVQGTQAAVAALQDLRYTSESGDRLDPTAVNILQQIIELGAETHDATALASVVAMAPGTVTVVKQVTEEEPSSNHTVMIQETVQQASVELAEQHHLVVSSDDVEGIETVTVYTQGGEASEFIVYVQEAMQPVEEQAVEQPAQEL

SEQ ID NO: 864 - DNA, 3283 bp, Homo sapiens
atccgccatgttggatgccgcagattcgccataacctcgccggctcttttcttaaaaaaataaaaataaaaagcgaagcgtcagcagggcgccccgccccctcggtcggcacgggagggggcccggaagagcccgaggcttttttttcctccgcggtggggcgttgccatggagacgcgggcggcagaaaacacggccatctttatgtgtaaatgttgtaacctcttctcaccaaatcagtcggaactcctctcccacgtttcagagaagcacatggaagaaggggttaatgttgatgagattattattccccttaggcctctgagtacacctgaaccccccaactcaagcaaaaccggagatgagtttttggtcatgaagaggaagagaggcaggcctaaggggtccacgaagaagtccagcacagaagaggagctggcagaaaacatcgtgagtccgactgaggacagcccgctggctccggaggaagggaacagcctgcctccaagcagcttggagtgtagcaagtgctgtcggaagttctccaacacgcgccagctgcggaagcacatctgcattatcgtgctgaatttgggtgaggaggaaggagaagcaggtaacgagtctgaccttgaactagaaaagaagtgtaaggaagatgatcgggaaaaagcctcgaaaagaccacggtcacagaaaacagagaaagtccagaagatctcaggaaaggaggccagacagctttctggggcgaagaaacccatcataagtgtggttttaactgcacacgaagcaattccaggtgctaccaagattgtgccagtggaggctgggccccctgaaacaggagctacaaattctgagaccacttcagcagacctggtgcctcggagaggctaccaggaatacgccattcagcagacaccttatgagcaaccaatgaagtcaagcaggctaggtcccactcagctcaaaatcttcacttgtgaatactgcaacaaggtcttcaagttcaagcactcgctgcaggcccacctgaggatccacaccaatgaaaagccatacaagtgcccccagtgcagctatgccagtgccatcaaggccaacctcaatgtgcacctgcgcaagcacactggagagaagttcgcctgcgactattgctcgttcacctgcctgagcaagggccacctcaaggtgcacatcgagcgagtgcacaagaagatcaagcagcactgccgcttctgcaagaagaagtactctgacgtcaagaacctcatcaagcacatccgagacgcgcatgacccacaggacaagaaggtcaaagaggccttggacgagctctgcctgatgacgagggagggcaagcggcagctgctctatgactgccacatctgtgagcgcaagttcaagaacgagctggaccgtgaccgccatatgctggtccacggagacaagtggccttttgcctgtgagctctgtggccatggggccaccaagtaccaggcgctggaactgcatgtcaggaagcaccccttcgtgtacgtctgtgccgtctgccgcaagaagttcgtcagctccatcaggctgcgcacccacatcaaagaggtgcacggggctgcccaggaggccttggtcttcaccagttccatcaaccagagcttctgcctcctggaacctggtggggacatccagcaagaagctctgggggaccagctacagctggtggaagaggagtttgccctccagggcgtgaatgcactcaaggaagaggcctgtcctggggacactcagctggaggagggccggaaggagccggaggcccctggggaaatgcctgccccagctgtgcacctggcctccccgcaggccgaaagcacagccctgccaccctgtgagctggaaaccaccgtggtctcctcctcagacctgcattctcaagaggtggtttcagatgattttttgttgaaaaatgatacctcctccgcagaggctcatgctgctcctgagaagcccccagacatgcagcacagaagctcagtccagacgcaaggtgaagtgatcacactactgctgtccaaggcccagagtgctgggtcagatcaggaaagccatggcgcccagagccccctaggggaagggcagaacatggctgtgctttcagctggtgacccagatcccagcaggtgtctcaggtcaaacccagctgaggcctcagacctcctccctccagtagctggtggtggggacaccatcacacatcagcctgactcttgcaaagctgcccctgagcaccggtcaggcatcaccgctttcatgaaggtcctgaacagtttacagaagaagcaaatgaacaccagcttgtgtgagcggatccggaaggtttatggagacctggagtgtgaatactgtggcaaacttttttggtaccaagtgcattttgatatgcatgtccgcacccacacccgggaacatctgtattattgctctcagtgtcattattcttccatcaccaaaaactgccttaaacgccacgtaattcagaaacacagtaacatcttgctgaagtgtcccaccgatggctgtgactactcaactccagataaatataagctacaggcacatcttaaagttcacacagcactggacaaaaggagttattcttgtcctgtttgtgaaaagtctttttcagaggatcgattgataaagtcacatatcaagaccaaccatcctgaggtctccatgagcaccatttctgaggttctcgggaggagggttcagctgaaagggctaattggaaagagagccatgaaatgcccatattgtgacttttatttcatgaagaatggctcagaccttcagcgtcatatttgggctcatgaaggtgtgaagcccttcaagtgttctttgtgtgagtatgcaactcgtagcaagagtaacctcaaggctcatatgaatcgtcacagcactgagaaaacccacctatgtgacatgtgtggcaagaaattcaaatcaaaagggacactgaaaagtcacaaactccttcacactgcagatgggaagcagtttaagtgcacggtgtgtgactacacagcggcccagaagccacagctgctgcggcacatggaacagcatgtctccttcaagcctttccgctgtgcccattgccattactcctgcaacatatctggctctctgaagcggcactacaacaggaagcaccctaatgaggagtatgccaacgtgggcaccggggagctggcagcggaggtgctcatccagcaag

SEQ ID NO: 865 - protein, 1038 aa, Homo sapiens
METRAAENTAIFMCKCCNLFSPNQSELLSHVSEKHMEEGVNVDEIIIPLRPLSTPEPPNSSKTGDEFLVMKRKRGRPKGSTKKSSTEEELAENIVSPTEDSPLAPEEGNSLPPSSLECSKCCRKFSNTRQLRKHICIIVLNLGEEEGEAGNESDLELEKKCKEDDREKASKRPRSQKTEKVQKISGKEARQLSGAKKPIISVVLTAHEAIPGATKIVPVEAGPPETGATNSETTSADLVPRRGYQEYAIQQTPYEQPMKSSRLGPTQLKIFTCEYCNKVFKFKHSLQAHLRIHTNEKPYKCPQCSYASAIKANLNVHLRKHTGEKFACDYCSFTCLSKGHLKVHIERVHKKIKQHCRFCKKKYSDVKNLIKHIRDAHDPQDKKVKEALDELCLMTREGKRQLLYDCHICERKFKNELDRDRHMLVHGDKWPFACELCGHGATKYQALELHVRKHPFVYVCAVCRKKFVSSIRLRTHIKEVHGAAQEALVFTSSINQSFCLLEPGGDIQQEALGDQLQLVEEEFALQGVNALKEEACPGDTQLEEGRKEPEAPGEMPAPAVHLASPQAESTALPPCELETTVVSSSDLHSQEVVSDDFLLKNDTSSAEAHAAPEKPPDMQHRSSVQTQGEVITLLLSKAQSAGSDQESHGAQSPLGEGQNMAVLSAGDPDPSRCLRSNPAEASDLLPPVAGGGDTITHQPDSCKAAPEHRSGITAFMKVLNSLQKKQMNTSLCERIRKVYGDLECEYCGKLFWYQVHFDMHVRTHTREHLYYCSQCHYSSITKNCLKRHVIQKHSNILLKCPTDGCDYSTPDKYKLQAHLKVHTALDKRSYSCPVCEKSFSEDRLIKSHIKTNHPEVSMSTISEVLGRRVQLKGLIGKRAMKCPYCDFYFMKNGSDLQRHIWAHEGVKPFKCSLCEYATRSKSNLKAHMNRHSTEKTHLCDMCGKKFKSKGTLKSHKLLHTADGKQFKCTVCDYTAAQKPQLLRHMEQHVSFKPFRCAHCHYSCNISGSLKRHYNRKHPNEEYANVGTGELAAEVLIQQ

SEQ ID NO: 866 - DNA, 75 bp, Homo sapiens
gcctcatcccctcttcagtgcaggaatatgttagcgttgtatcttgggagaaagacacagtctccatcatcccag

SEQ ID NO: 867 - DNA, 75 bp, Homo sapiens; identical to SEQ ID NO: 634

SEQ ID NO: 868 - DNA, 150 bp, Homo sapiens
gcctcatcccctcttcagtgcaggaatatgttagcgttgtatcttgggagaaagacacagtctccatcatcccagccttgcctccccgattgaaagagatgaaaagccaggaatcggctgcaggttccaaactagtccttcggtgtgaaa

SEQ ID NO: 869 - protein, 49 aa, Homo sapiens
LIPSSVQEYVSVVSWEKDTVSIIPALPPRLKEMKSQESAAGSKLVLRCE

SEQ ID NO: 870 - DNA, 183 bp, Homo sapiens
agccgagcgctgggctgaggagcagagagagcggggcgccgagtgcgggcggctgggagcgcgctgagcgggggagaggcgctgccgcacggccggccacaggaccacctccccggagaatagggcctctttatggcatgtggctggtaactttcctcctgctcctggactctttacacaaag

SEQ ID NO: 871 - DNA, 318 bp, Homo sapiens
cccgccctgaagatgttggcaccagcctctactttgtaaatgactccttgcagcaggtgaccttttccagctccgtgggggtggtggtgccctgcccggccgcgggctcccccagcgcggcccttcgatggtacctggccacaggggacgacatctacgacgtgccgcacatccggcacgtccacgccaacgggacgctgcagctctaccccttctccccctccgccttcaatagctttatccacgacaatgactacttctgcaccgcggagaacgctgccggcaagatccggagccccaacatccgcgtcaaagcag

SEQ ID NO: 872 - DNA, 147 bp, Homo sapiens
ttttcagggaaccctacaccgtccgggtggaggatcaaaggtcaatgcgtggcaacgtggccgtcttcaagtgcctcatcccctcttcagtgcaggaatatgttagcgttgtatcttgggagaaagacacagtctccatcatcccag

SEQ ID NO: 873 - DNA, 147 bp, Homo sapiens
aacacaggttttttattacctaccacggcgggctgtacatctctgacgtacagaaggaggacgccctctccacctatcgctgcatcaccaagcacaagtatagcggggagacccggcagagcaatggggcacgcctctctgtgacag

SEQ ID NO: 874 - DNA, 279 bp, Homo sapiens
accctgctgagtcgatccccaccatcctggatggcttccactcccaggaagtgtgggccggccacaccgtggagctgccctgcaccgcctcgggctaccctatccccgccatccgctggctcaaggatggccggcccctcccggctgacagccgctggaccaagcgcatcacagggctgaccatcagcgacttgcggaccgaggacagcggcacctacatttgtgaggtcaccaacaccttcggttcggcagaggccacaggcatcctcatggtcattg

SEQ ID NO: 875 - DNA, 276 bp, Homo sapiens
atccccttcatgtgaccctgacaccaaagaagctgaagaccggcattggcagcacggtcatcctctcctgtgccctgacgggctccccagagttcaccatccgctggtatcgcaacacggagctggtgctgcctgacgaggccatctccatccgcgggctcagcaacgagacgctgctcatcacctcggcccagaagagccattccggggcctaccagtgcttcgctacccgcaaggcccagaccgcccaggactttgccatcattgcacttgagg

SEQ ID NO: 876 - DNA, 297 bp, Homo sapiens
atggcacgccccgcatcgtctcgtccttcagcgagaaggtggtcaaccccggggagcagttctcactgatgtgtgcggccaagggcgccccgccccccacggtcacctgggccctcgacgatgagcccatcgtgcgggatggcagccaccgcaccaaccagtacaccatgtcggacggcaccaccatcagccacatgaacgtcacaggcccccagatccgcgacgggggcgtgtaccggtgcacagcgcggaacttggtgggcagtgctgaatatcaggcgcgaataaacgtaagag

SEQ ID NO: 877 - DNA, 273 bp, Homo sapiens
gcccacccagcatccgggctatgcggaacatcacagcagtcgccgggcgggacacccttatcaactgcagggtcatcggctatccctactactccatcaagtggtacaaggatgccctgctgctgccagacaaccaccgccaggtggtgtttgagaatgggaccctcaagctgactgacgtgcagaagggcatggatgagggggagtacctgtgcagtgtcctcatccagccccagctctccatcagccagagcgttcacgtagccgtcaaag

SEQ ID NO: 878 - DNA, 279 bp, Homo sapiens
tgccccctctgatccagcccttcgaattcccacccgcctccatcggccagctgctctacattccctgtgtggtgtcctcgggggacatgcccatccgtatcacctggaggaaggacggacaggtgatcatctcaggctcgggcgtgaccatcgagagcaaggaattcatgagctccctgcagatctctagcgtctccctcaagcacaacggcaactatacatgcatcgccagcaacgcagccgccaccgtgagccgggagcgccagctcatcgtgcgtg

SEQ ID NO: 879 - DNA, 120 bp, Homo sapiens
tgccccctcgatttgtggtgcaacccaacaaccaggatggcatctacggcaaagctggtgtgctcaactgctcggtggacggctaccccccacccaaggtcatgtggaagcatgccaagg

SEQ ID NO: 880 - DNA, 177 bp, Homo sapiens
ggagcgggaacccccagcagtaccaccctgtgcccctcactggccgcatccagatcctgcccaacagctcgctgctgatccgccacgtcctagaagaggacatcggctactacctctgccaggccagcaacggcgtaggcaccgacatcagcaagtccatgttcctcacagtcaaga

SEQ ID NO: 881 - DNA, 200 bp, Homo sapiens
tcccggccatgatcacttcccaccccaacaccaccatcgccatcaagggccatgcgaaggagctaaactgcacggcacggggtgagcggcccatcatcatccgctgggagaagggggacacagtcatcgaccctgaccgcgtcatgcggtatgccatcgccaccaaggacaacggcgacgaggtcgtctccacactgaag

SEQ ID NO: 882 - DNA, 97 bp, Homo sapiens
ctcaagcccgctgaccgtggggactctgtgttcttcagctgccatgccatcaactcgtatggggaggaccggggcttgatccaactcactgtgcaag

SEQ ID NO: 883 - DNA, 129 bp, Homo sapiens
agccccccgaccccccagagctggagatccgggaggtgaaggcccggagcatgaacctgcgctggacccagcgattcgacgggaacagcatcatcacgggcttcgacattgaatacaagaacaaatcag

SEQ ID NO: 884 - DNA, 168 bp, Homo sapiens
attcctgggacttcaagcagtccacacgcaacatctcccccaccatcaaccaggccaacattgtggacttgcacccggcatctgtgtacagcatccgcatgtactctttcaacaagattggccgcagtgaaccaagcaaggagctcaccatcagcactgaggaggccg

SEQ ID NO: 885 - DNA, 71 bp, Homo sapiens
ctcccgatgggccccccatggatgttaccttgcagccagtgacctcacagagcatccaggtgacctggaag

SEQ ID NO: 886 - DNA, 241 bp, Homo sapiens
gcacccaagaaggagctgcagaacggtgtcatccggggctaccagattggctacagagagaacagccccggcagcaacgggcagtacagcatcgtggagatgaaggccacgggggacagcgaggtctacaccctggacaacctcaagaagttcgcccagtatggggtggtggtccaagccttcaatcgggctggcacggggccctcttccagcgagatcaatgccaccactctggaggatg

SEQ ID NO: 887 - DNA, 147 bp, Homo sapiens
tgcccagccagccccctgagaacgtccgggccctgtccatcacttctgacgtggccgtcatctcctggtcagagcccccgcgcagcaccctcaatggcgtcctcaaaggctatcgggtcatcttctggtccctctatgttgatgggg

SEQ ID NO: 888 - DNA, 156 bp, Homo sapiens
agtggggcgagatgcagaacatcaccaccacgcgggagcgggtggagctgcggggcatggagaagttcaccaactacagcgtccaggtgctggcctacacccaggctggggacggcgtacgcagcagtgtgctctacatccagaccaaggaggacg

SEQ ID NO: 889 - DNA, 140 bp, Homo sapiens
ttccaggtccccctgctggcatcaaagctgtcccttcatcagctagcagtgtggttgtgtcttggctcccccctaccaagcccaacggggtgatccgcaagtacaccatcttctgttccagccccgggtctggccagccg

SEQ ID NO: 890 - DNA, 154 bp, Homo sapiens
gctcccagcgagtacgagacgagtccagagcagctcttctaccggatcgcccacctaaaccgcggtcagcagtatctgctgtgggtggccgccgtcacctctgccggccggggcaacagcagcgagaaggtgaccatcgagcctgctggcaagg

SEQ ID NO: 891 - DNA, 118 bp, Homo sapiens
ccccagcaaagatcatctcctttgggggcaccgtgacaacaccttggatgaaagatgttcggctgccttgcaattcagtgggagatccagcccctgctgtgaagtggaccaaggacag

SEQ ID NO: 892 - DNA, 164 bp, Homo sapiens
tgaagactcggccattccagtgtccatggatgggcaccggctcatccacaccaatggcacactgctgctgcgtgcagtgaaggctgaggactctggctactacacgtgcacggccaccaacactggtggctttgacaccatcatcgtcaaccttctggtgcaag

SEQ ID NO: 893 - DNA, 99 bp, Homo sapiens
ttcccccggaccagccccgcctcactgtctccaaaacctcagcttcgtccatcaccctgacctggattccaggtgacaatgggggcagctccatccgag

SEQ ID NO: 894 - DNA, 189 bp, Homo sapiens
gcttcgtgctacagtactcggtggacaacagcgaggagtggaaggatgtgttcatcagctccagcgagcgctccttcaagctggacagcctcaagtgtggcacgtggtacaaggtgaagctggcagccaagaacagcgtgggctctgggcgcatcagcgagatcatcgaggccaagacccacgggcggg

SEQ ID NO: 895 - DNA, 288 bp, Homo sapiens
agccctccttcagcaaagaccaacacctcttcacccacatcaactccacgcatgctcggcttaacctgcagggctggaacaatgggggctgccctatcacagccatcgttctggagtaccggcccaaggggacctgggcctggcagggcctccgggccaacagctccggggaggtgtttctgacggaactgcgagaggccacgtggtacgagctgcgcatgagggcttgcaacagtgcgggctgcggcaatgaaacagcccagttcgccaccctggactacgatggca

SEQ ID NO: 896 - DNA, 156 bp, Homo sapiens
gcaccattccacccatcaagtctgctcaaggtgaaggggatgatgtgaagaagctgttcaccatcggctgccctgtcatcctggccacactgggggtggcactgctcttcatcgtacgcaagaagaggaaggagaaacggctgaagcgactccgag

SEQ ID NO: 897 - DNA, 31 bp, Homo sapiens
atgcaaagagtttggcagaaatgttgataag

SEQ ID NO: 898 - DNA, 119 bp, Homo sapiens
caagaacaatagaagctttgacacccctgtgaaagggccaccccagggcccacggctacacattgacatccccagggtccagctgctcatcgaggacaaagaaggcatcaagcaactgg

SEQ ID NO: 899 - DNA, 153 bp, Homo sapiens
gagatgacaaggccaccatccctgtgacagatgctgagttcagccaagctgtcaacccacagagcttctgtactggcgtctccttgcaccacccaaccctcatccagagcacaggacccctcatcgacatgtctgacatccggccaggaacca

SEQ ID NO: 900 - DNA, 195 bp, Homo sapiens
atccagtgtccaggaagaatgtgaagtcagcccacagcacccggaaccggtactcaagccagtggaccctgaccaagtgccaggcctccacacctgcccgcaccctcacctccgactggcgcaccgtgggctcccagcatggtgtcacggtcactgagagtgacagctacagtgccagcctgtcccaggacacag

SEQ ID NO: 901 - DNA, 312 bp, Homo sapiens
acaaaggaaggaacagcatggtgtccactgagagtgcctcttccacctacgaggagctggcccgggcctatgagcatgccaagctggaggagcagctgcagcacgccaagtttgagatcaccgagtgcttcatctctgacagttcctctgaccagatgaccacaggcaccaacgagaacgccgacagcatgacatccatgagcacaccctcagagcctggcatctgccgctttaccgcctcaccacccaagccccaggatgcggaccggggcaaaaacgtggctgtgcccatccctcaccgggccaacaaga

SEQ ID NO: 902 - DNA, 1032 bp, Homo sapiens
gtgactactgcaacctgcccctgtatgccaagtcagaggccttctttcgaaaggcagatggacgtgagccctgccccgtggtcccaccccgtgaggcctccatccggaacctggctcgaacctaccacacccaggctcgccacctgaccctggaccctgccagcaagtccttgggccttccccacccaggggcccccgctgccgcctccacagccaccttacctcagaggactctggccatgccagcccccccagccggcacagcccccccagcccccggccccacccctgctgagccacccaccgcccccagcgctgcccctccggcccccagcaccgagcctccacgagccgggggcccacacaccaaaatggggggctccagggactcgcttctcgagatgagcacatcgggggtagggaggtctcagaagcagggggccggggcctactccaaatcctacaccctggtgtagggcccgcaggaagagcagccacgcctggaccgcgccgcgccgcagccccacacgccagctcggctgtttttctgcattatttatattcaactgacagacaaaaaccaaccaacgacaaaacaaaaacccccaatcatgaacgcctgtacatagaactcttttgtacaaatgaaactattttcttcttctccatgaagccagggcacaaagaatttgacagtacaagtcaaatcccccaccccacaaaatatgtgtggagatatatatacatatatagacagacaggaacgcgtccacgagctatatatctatatatttctctcaccctattttgagacagaggcacaaagactcagcaatttttttccctcctcctcaccttccccccagtctaggtggttttgacaaagaccaaaatcccaactcagagacactgcatgcgattttactgttccaagaaaaccaggagttgcttcaatttgcagatgcttatgtgttaatacctttttctatgaaaaaagacccagcgccgtgtgcaataaaggttatgtttcta

SEQ ID NO: 903 - DNA, 6855 bp, Artificial Sequence
  Full mRNA polynucleotide sequence of DSCAML1
agccgagcgctgggctgaggagcagagagagcggggcgccgagtgcgggcggctgggagcgcgctgagcgggggagaggcgctgccgcacggccggccacaggaccacctccccggagaatagggcctctttatggcatgtggctggtaactttcctcctgctcctggactctttacacaaagcccgccctgaagatgttggcaccagcctctactttgtaaatgactccttgcagcaggtgaccttttccagctccgtgggggtggtggtgccctgcccggccgcgggctcccccagcgcggcccttcgatggtacctggccacaggggacgacatctacgacgtgccgcacatccggcacgtccacgccaacgggacgctgcagctctaccccttctccccctccgccttcaatagctttatccacgacaatgactacttctgcaccgcggagaacgctgccggcaagatccggagccccaacatccgcgtcaaagcagttttcagggaaccctacaccgtccgggtggaggatcaaaggtcaatgcgtggcaacgtggccgtcttcaagtgcctcatcccctcttcagtgcaggaatatgttagcgttgtatcttgggagaaagacacagtctccatcatcccagaacacaggttttttattacctaccacggcgggctgtacatctctgacgtacagaaggaggacgccctctccacctatcgctgcatcaccaagcacaagtatagcggggagacccggcagagcaatggggcacgcctctctgtgacagaccctgctgagtcgatccccaccatcctggatggcttccactcccaggaagtgtgggccggccacaccgtggagctgccctgcaccgcctcgggctaccctatccccgccatccgctggctcaaggatggccggcccctcccggctgacagccgctggaccaagcgcatcacagggctgaccatcagcgacttgcggaccgaggacagcggcacctacatttgtgaggtcaccaacaccttcggttcggcagaggccacaggcatcctcatggtcattgatccccttcatgtgaccctgacaccaaagaagctgaagaccggcattggcagcacggtcatcctctcctgtgccctgacgggctccccagagttcaccatccgctggtatcgcaacacggagctggtgctgcctgacgaggccatctccatccgcgggctcagcaacgagacgctgctcatcacctcggcccagaagagccattccggggcctaccagtgcttcgctacccgcaaggcccagaccgcccaggactttgccatcattgcacttgaggatggcacgccccgcatcgtctcgtccttcagcgagaaggtggtcaaccccggggagcagttctcactgatgtgtgcggccaagggcgccccgccccccacggtcacctgggccctcgacgatgagcccatcgtgcgggatggcagccaccgcaccaaccagtacaccatgtcggacggcaccaccatcagccacatgaacgtcacaggcccccagatccgcgacgggggcgtgtaccggtgcacagcgcggaacttggtgggcagtgctgaatatcaggcgcgaataaacgtaagaggcccacccagcatccgggctatgcggaacatcacagcagtcgccgggcgggacacccttatcaactgcagggtcatcggctatccctactactccatcaagtggtacaaggatgccctgctgctgccagacaaccaccgccaggtggtgtttgagaatgggaccctcaagctgactgacgtgcagaagggcatggatgagggggagtacctgtgcagtgtcctcatccagccccagctctccatcagccagagcgttcacgtagccgtcaaagtgccccctctgatccagcccttcgaattcccacccgcctccatcggccagctgctctacattccctgtgtggtgtcctcgggggacatgcccatccgtatcacctggaggaaggacggacaggtgatcatctcaggctcgggcgtgaccatcgagagcaaggaattcatgagctccctgcagatctctagcgtctccctcaagcacaacggcaactatacatgcatcgccagcaacgcagccgccaccgtgagccgggagcgccagctcatcgtgcgtgtgccccctcgatttgtggtgcaacccaacaaccaggatggcatctacggcaaagctggtgtgctcaactgctcggtggacggctaccccccacccaaggtcatgtggaagcatgccaaggggagcgggaacccccagcagtaccaccctgtgcccctcactggccgcatccagatcctgcccaacagctcgctgctgatccgccacgtcctagaagaggacatcggctactacctctgccaggccagcaacggcgtaggcaccgacatcagcaagtccatgttcctcacagtcaagatcccggccatgatcacttcccaccccaacaccaccatcgccatcaagggccatgcgaaggagctaaactgcacggcacggggtgagcggcccatcatcatccgctgggagaagggggacacagtcatcgaccctgaccgcgtcatgcggtatgccatcgccaccaaggacaacggcgacgaggtcgtctccacactgaagctcaagcccgctgaccgtggggactctgtgttcttcagctgccatgccatcaactcgtatggggaggaccggggcttgatccaactcactgtgcaagagccccccgaccccccagagctggagatccgggaggtgaaggcccggagcatgaacctgcgctggacccagcgattcgacgggaacagcatcatcacgggcttcgacattgaatacaagaacaaatcagattcctgggacttcaagcagtccacacgcaacatctcccccaccatcaaccaggccaacattgtggacttgcacccggcatctgtgtacagcatccgcatgtactctttcaacaagattggccgcagtgaaccaagcaaggagctcaccatcagcactgaggaggccgctcccgatgggccccccatggatgttaccttgcagccagtgacctcacagagcatccaggtgacctggaaggcacccaagaaggagctgcagaacggtgtcatccggggctaccagattggctacagagagaacagccccggcagcaacgggcagtacagcatcgtggagatgaaggccacgggggacagcgaggtctacaccctggacaacctcaagaagttcgcccagtatggggtggtggtccaagccttcaatcgggctggcacggggccctcttccagcgagatcaatgccaccactctggaggatgtgcccagccagccccctgagaacgtccgggccctgtccatcacttctgacgtggccgtcatctcctggtcagagcccccgcgcagcaccctcaatggcgtcctcaaaggctatcgggtcatcttctggtccctctatgttgatggggagtggggcgagatgcagaacatcaccaccacgcgggagcgggtggagctgcggggcatggagaagttcaccaactacagcgtccaggtgctggcctacacccaggctggggacggcgtacgcagcagtgtgctctacatccagaccaaggaggacgttccaggtccccctgctggcatcaaagctgtcccttcatcagctagcagtgtggttgtgtcttggctcccccctaccaagcccaacggggtgatccgcaagtacaccatcttctgttccagccccgggtctggccagccggctcccagcgagtacgagacgagtccagagcagctcttctaccggatcgcccacctaaaccgcggtcagcagtatctgctgtgggtggccgccgtcacctctgccggccggggcaacagcagcgagaaggtgaccatcgagcctgctggcaaggccccagcaaagatcatctcctttgggggcaccgtgacaacaccttggatgaaagatgttcggctgccttgcaattcagtgggagatccagcccctgctgtgaagtggaccaaggacagtgaagactcggccattccagtgtccatggatgggcaccggctcatccacaccaatggcacactgctgctgcgtgcagtgaaggctgaggactctggctactacacgtgcacggccaccaacactggtggctttgacaccatcatcgtcaaccttctggtgcaagttcccccggaccagccccgcctcactgtctccaaaacctcagcttcgtccatcaccctgacctggattccaggtgacaatgggggcagctccatccgaggcttcgtgctacagtactcggtggacaacagcgaggagtggaaggatgtgttcatcagctccagcgagcgctccttcaagctggacagcctcaagtgtggcacgtggtacaaggtgaagctggcagccaagaacagcgtgggctctgggcgcatcagcgagatcatcgaggccaagacccacgggcgggagccctccttcagcaaagaccaacacctcttcacccacatcaactccacgcatgctcggcttaacctgcagggctggaacaatgggggctgccctatcacagccatcgttctggagtaccggcccaaggggacctgggcctggcagggcctccgggccaacagctccggggaggtgtttctgacggaactgcgagaggccacgtggtacgagctgcgcatgagggcttgcaacagtgcgggctgcggcaatgaaacagcccagttcgccaccctggactacgatggcagcaccattccacccatcaagtctgctcaaggtgaaggggatgatgtgaagaagctgttcaccatcggctgccctgtcatcctggccacactgggggtggcactgctcttcatcgtacgcaagaagaggaaggagaaacggctgaagcgactccgagatgcaaagagtttggcagaaatgttgataagcaagaacaatagaagctttgacacccctgtgaaagggccaccccagggcccacggctacacattgacatccccagggtccagctgctcatcgaggacaaagaaggcatcaagcaactgggagatgacaaggccaccatccctgtgacagatgctgagttcagccaagctgtcaacccacagagcttctgtactggcgtctccttgcaccacccaaccctcatccagagcacaggacccctcatcgacatgtctgacatccggccaggaaccaatccagtgtccaggaagaatgtgaagtcagcccacagcacccggaaccggtactcaagccagtggaccctgaccaagtgccaggcctccacacctgcccgcaccctcacctccgactggcgcaccgtgggctcccagcatggtgtcacggtcactgagagtgacagctacagtgccagcctgtcccaggacacagacaaaggaaggaacagcatggtgtccactgagagtgcctcttccacctacgaggagctggcccgggcctatgagcatgccaagctggaggagcagctgcagcacgccaagtttgagatcaccgagtgcttcatctctgacagttcctctgaccagatgaccacaggcaccaacgagaacgccgacagcatgacatccatgagcacaccctcagagcctggcatctgccgctttaccgcctcaccacccaagccccaggatgcggaccggggcaaaaacgtggctgtgcccatccctcaccgggccaacaagagtgactactgcaacctgcccctgtatgccaagtcagaggccttctttcgaaaggcagatggacgtgagccctgccccgtggtcccaccccgtgaggcctccatccggaacctggctcgaacctaccacacccaggctcgccacctgaccctggaccctgccagcaagtccttgggccttccccacccaggggcccccgctgccgcctccacagccaccttacctcagaggactctggccatgccagcccccccagccggcacagcccccccagcccccggccccacccctgctgagccacccaccgcccccagcgctgcccctccggcccccagcaccgagcctccacgagccgggggcccacacaccaaaatggggggctccagggactcgcttctcgagatgagcacatcgggggtagggaggtctcagaagcagggggccggggcctactccaaatcctacaccctggtgtagggcccgcaggaagagcagccacgcctggaccgcgccgcgccgcagccccacacgccagctcggctgtttttctgcattatttatattcaactgacagacaaaaaccaaccaacgacaaaacaaaaacccccaatcatgaacgcctgtacatagaactcttttgtacaaatgaaactattttcttcttctccatgaagccagggcacaaagaatttgacagtacaagtcaaatcccccaccccacaaaatatgtgtggagatatatatacatatatagacagacaggaacgcgtccacgagctatatatctatatatttctctcaccctattttgagacagaggcacaaagactcagcaatttttttccctcctcctcaccttccccccagtctaggtggttttgacaaagaccaaaatcccaactcagagacactgcatgcgattttactgttccaagaaaaccaggagttgcttcaatttgcagatgcttatgtgttaatacctttttctatgaaaaaagacccagcgccgtgtgcaataaaggttatgtttcta

SEQ ID NO: 904 - protein, 15 aa, Homo sapiens
MWLVTFLLLLDSLHK

SEQ ID NO: 905 - protein, 105 aa, Homo sapiens
RPEDVGTSLYFVNDSLQQVTFSSSVGVVVPCPAAGSPSAALRWYLATGDDIYDVPHIRHVHANGTLQLYPFSPSAFNSFIHDNDYFCTAENAAGKIRSPNIRVKA

SEQ ID NO: 906 - protein, 48 aa, Homo sapiens
FREPYTVRVEDQRSMRGNVAVFKCLIPSSVQEYVSVVSWEKDTVSIIP

SEQ ID NO: 907 - protein, 48 aa, Homo sapiens
HRFFITYHGGLYISDVQKEDALSTYRCITKHKYSGETRQSNGARLSVT

SEQ ID NO: 908 - protein, 92 aa, Homo sapiens
PAESIPTILDGFHSQEVWAGHTVELPCTASGYPIPAIRWLKDGRPLPADSRWTKRITGLTISDLRTEDSGTYICEVTNTFGSAEATGILMVI

SEQ ID NO: 909 - protein, 91 aa, Homo sapiens
PLHVTLTPKKLKTGIGSTVILSCALTGSPEFTIRWYRNTELVLPDEAISIRGLSNETLLITSAQKSHSGAYQCFATRKAQTAQDFAIIALE

SEQ ID NO: 910 - protein, 98 aa, Homo sapiens
GTPRIVSSFSEKVVNPGEQFSLMCAAKGAPPPTVTWALDDEPIVRDGSHRTNQYTMSDGTTISHMNVTGPQIRDGGVYRCTARNLVGSAEYQARINVR

SEQ ID NO: 911 - protein, 90 aa, Homo sapiens
PPSIRAMRNITAVAGRDTLINCRVIGYPYYSIKWYKDALLLPDNHRQVVFENGTLKLTDVQKGMDEGEYLCSVLIQPQLSISQSVHVAVK

SEQ ID NO: 912 - protein, 92 aa, Homo sapiens
PPLIQPFEFPPASIGQLLYIPCVVSSGDMPIRITWRKDGQVIISGSGVTIESKEFMSSLQISSVSLKHNGNYTCIASNAAATVSRERQLIVR

SEQ ID NO: 913 - protein, 39 aa, Homo sapiens
PPRFVVQPNNQDGIYGKAGVLNCSVDGYPPPKVMWKHAK

SEQ ID NO: 914 - protein, 58 aa, Homo sapiens
SGNPQQYHPVPLTGRIQILPNSSLLIRHVLEEDIGYYLCQASNGVGTDISKSMFLTVK

SEQ ID NO: 915 - protein, 66 aa, Homo sapiens
PAMITSHPNTTIAIKGHAKELNCTARGERPIIIRWEKGDTVIDPDRVMRYAIATKDNGDEVVSTLK

SEQ ID NO: 916 - protein, 32 aa, Homo sapiens
LKPADRGDSVFFSCHAINSYGEDRGLIQLTVQ

SEQ ID NO: 917 - protein, 42 aa, Homo sapiens
PPDPPELEIREVKARSMNLRWTQRFDGNSIITGFDIEYKNKS

SEQ ID NO: 918 - protein, 55 aa, Homo sapiens
SWDFKQSTRNISPTINQANIVDLHPASVYSIRMYSFNKIGRSEPSKELTISTEEA

SEQ ID NO: 919 - protein, 23 aa, Homo sapiens
PDGPPMDVTLQPVTSQSIQVTWK

SEQ ID NO: 920 - protein, 80 aa, Homo sapiens
APKKELQNGVIRGYQIGYRENSPGSNGQYSIVEMKATGDSEVYTLDNLKKFAQYGVVVQAFNRAGTGPSSSEINATTLED

SEQ ID NO: 921 - protein, 48 aa, Homo sapiens
PSQPPENVRALSITSDVAVISWSEPPRSTLNGVLKGYRVIFWSLYVDG

SEQ ID NO: 922 - protein, 51 aa, Homo sapiens
WGEMQNITTTRERVELRGMEKFTNYSVQVLAYTQAGDGVRSSVLYIQTKED

SEQ ID NO: 923 - protein, 46 aa, Homo sapiens
PGPPAGIKAVPSSASSVVVSWLPPTKPNGVIRKYTIFCSSPGSGQP

SEQ ID NO: 924 - protein, 51 aa, Homo sapiens
APSEYETSPEQLFYRIAHLNRGQQYLLWVAAVTSAGRGNSSEKVTIEPAGK

SEQ ID NO: 925 - protein, 38 aa, Homo sapiens
PAKIISFGGTVTTPWMKDVRLPCNSVGDPAPAVKWTKD

SEQ ID NO: 926 - protein, 54 aa, Homo sapiens
EDSAIPVSMDGHRLIHTNGTLLLRAVKAEDSGYYTCTATNTGGFDTIIVNLLVQ

SEQ ID NO: 927 - protein, 32 aa, Homo sapiens
PPDQPRLTVSKTSASSITLTWIPGDNGGSSIR

SEQ ID NO: 928 - protein, 62 aa, Homo sapiens
FVLQYSVDNSEEWKDVFISSSERSFKLDSLKCGTWYKVKLAAKNSVGSGRISEIIEAKTHGR

SEQ ID NO: 929 - protein, 95 aa, Homo sapiens
PSFSKDQHLFTHINSTHARLNLQGWNNGGCPITAIVLEYRPKGTWAWQGLRANSSGEVFLTELREATWYELRMRACNSAGCGNETAQFATLDYDG

SEQ ID NO: 930 - protein, 51 aa, Homo sapiens
TIPPIKSAQGEGDDVKKLFTIGCPVILATLGVALLFIVRKKRKEKRLKRLR

SEQ ID NO: 931 - protein, 9 aa, Homo sapiens
AKSLAEMLI

SEQ ID NO: 932 - protein, 39 aa, Homo sapiens
KNNRSFDTPVKGPPQGPRLHIDIPRVQLLIEDKEGIKQL

SEQ ID NO: 933 - protein, 50 aa, Homo sapiens
DDKATIPVTDAEFSQAVNPQSFCTGVSLHHPTLIQSTGPLIDMSDIRPGT

SEQ ID NO: 934 - protein, 64 aa, Homo sapiens
PVSRKNVKSAHSTRNRYSSQWTLTKCQASTPARTLTSDWRTVGSQHGVTVTESDSYSASLSQDT

SEQ ID NO: 935 - protein, 103 aa, Homo sapiens
KGRNSMVSTESASSTYEELARAYEHAKLEEQLQHAKFEITECFISDSSSDQMTTGTNENADSMTSMSTPSEPGICRFTASPPKPQDADRGKNVAVPIPHRANK

SEQ ID NO: 936 - protein, 157 aa, Homo sapiens
DYCNLPLYAKSEAFFRKADGREPCPVVPPREASIRNLARTYHTQARHLTLDPASKSLGLPHPGAPAAASTATLPQRTLAMPAPPAGTAPPAPGPTPAEPPTAPSAAPPAPSTEPPRAGGPHTKMGGSRDSLLEMSTSGVGRSQKQGAGAYSKSYTLV

SEQ ID NO: 937 - protein, 2053 aa, Homo sapiens
MWLVTFLLLLDSLHKARPEDVGTSLYFVNDSLQQVTFSSSVGVVVPCPAAGSPSAALRWYLATGDDIYDVPHIRHVHANGTLQLYPFSPSAFNSFIHDNDYFCTAENAAGKIRSPNIRVKAVFREPYTVRVEDQRSMRGNVAVFKCLIPSSVQEYVSVVSWEKDTVSIIPEHRFFITYHGGLYISDVQKEDALSTYRCITKHKYSGETRQSNGARLSVTDPAESIPTILDGFHSQEVWAGHTVELPCTASGYPIPAIRWLKDGRPLPADSRWTKRITGLTISDLRTEDSGTYICEVTNTFGSAEATGILMVIDPLHVTLTPKKLKTGIGSTVILSCALTGSPEFTIRWYRNTELVLPDEAISIRGLSNETLLITSAQKSHSGAYQCFATRKAQTAQDFAIIALEDGTPRIVSSFSEKVVNPGEQFSLMCAAKGAPPPTVTWALDDEPIVRDGSHRTNQYTMSDGTTISHMNVTGPQIRDGGVYRCTARNLVGSAEYQARINVRGPPSIRAMRNITAVAGRDTLINCRVIGYPYYSIKWYKDALLLPDNHRQVVFENGTLKLTDVQKGMDEGEYLCSVLIQPQLSISQSVHVAVKVPPLIQPFEFPPASIGQLLYIPCVVSSGDMPIRITWRKDGQVIISGSGVTIESKEFMSSLQISSVSLKHNGNYTCIASNAAATVSRERQLIVRVPPRFVVQPNNQDGIYGKAGVLNCSVDGYPPPKVMWKHAKGSGNPQQYHPVPLTGRIQILPNSSLLIRHVLEEDIGYYLCQASNGVGTDISKSMFLTVKIPAMITSHPNTTIAIKGHAKELNCTARGERPIIIRWEKGDTVIDPDRVMRYAIATKDNGDEVVSTLKLKPADRGDSVFFSCHAINSYGEDRGLIQLTVQEPPDPPELEIREVKARSMNLRWTQRFDGNSIITGFDIEYKNKSDSWDFKQSTRNISPTINQANIVDLHPASVYSIRMYSFNKIGRSEPSKELTISTEEAAPDGPPMDVTLQPVTSQSIQVTWKAPKKELQNGVIRGYQIGYRENSPGSNGQYSIVEMKATGDSEVYTLDNLKKFAQYGVVVQAFNRAGTGPSSSEINATTLEDVPSQPPENVRALSITSDVAVISWSEPPRSTLNGVLKGYRVIFWSLYVDGEWGEMQNITTTRERVELRGMEKFTNYSVQVLAYTQAGDGVRSSVLYIQTKEDVPGPPAGIKAVPSSASSVVVSWLPPTKPNGVIRKYTIFCSSPGSGQPAPSEYETSPEQLFYRIAHLNRGQQYLLWVAAVTSAGRGNSSEKVTIEPAGKAPAKIISFGGTVTTPWMKDVRLPCNSVGDPAPAVKWTKDSEDSAIPVSMDGHRLIHTNGTLLLRAVKAEDSGYYTCTATNTGGFDTIIVNLLVQVPPDQPRLTVSKTSASSITLTWIPGDNGGSSIRGFVLQYSVDNSEEWKDVFISSSERSFKLDSLKCGTWYKVKLAAKNSVGSGRISEIIEAKTHGREPSFSKDQHLFTHINSTHARLNLQGWNNGGCPITAIVLEYRPKGTWAWQGLRANSSGEVFLTELREATWYELRMRACNSAGCGNETAQFATLDYDGSTIPPIKSAQGEGDDVKKLFTIGCPVILATLGVALLFIVRKKRKEKRLKRLRDAKSLAEMLISKNNRSFDTPVKGPPQGPRLHIDIPRVQLLIEDKEGIKQLGDDKATIPVTDAEFSQAVNPQSFCTGVSLHHPTLIQSTGPLIDMSDIRPGTNPVSRKNVKSAHSTRNRYSSQWTLTKCQASTPARTLTSDWRTVGSQHGVTVTESDSYSASLSQDTDKGRNSMVSTESASSTYEELARAYEHAKLEEQLQHAKFEITECFISDSSSDQMTTGTNENADSMTSMSTPSEPGICRFTASPPKPQDADRGKNVAVPIPHRANKSDYCNLPLYAKSEAFFRKADGREPCPVVPPREASIRNLARTYHTQARHLTLDPASKSLGLPHPGAPAAASTATLPQRTLAMPAPPAGTAPPAPGPTPAEPPTAPSAAPPAPSTEPPRAGGPHTKMGGSRDSLLEMSTSGVGRSQKQGAGAYSKSYTLV

SEQ ID NO: 938 - DNA, 648 bp, Homo sapiens
agccgagcgctgggctgaggagcagagagagcggggcgccgagtgcgggcggctgggagcgcgctgagcgggggagaggcgctgccgcacggccggccacaggaccacctccccggagaatagggcctctttatggcatgtggctggtaactttcctcctgctcctggactctttacacaaagcccgccctgaagatgttggcaccagcctctactttgtaaatgactccttgcagcaggtgaccttttccagctccgtgggggtggtggtgccctgcccggccgcgggctcccccagcgcggcccttcgatggtacctggccacaggggacgacatctacgacgtgccgcacatccggcacgtccacgccaacgggacgctgcagctctaccccttctccccctccgccttcaatagctttatccacgacaatgactacttctgcaccgcggagaacgctgccggcaagatccggagccccaacatccgcgtcaaagcagttttcagggaaccctacaccgtccgggtggaggatcaaaggtcaatgcgtggcaacgtggccgtcttcaagtgcctcatcccctcttcagtgcaggaatatgttagcgttgtatcttgggagaaagacacagtctccatcatcccag

SEQ ID NO: 939 - protein, 170 aa, Homo sapiens
MWLVTFLLLLDSLHKARPEDVGTSLYFVNDSLQQVTFSSSVGVVVPCPAAGSPSAALRWYLATGDDIYDVPHIRHVHANGTLQLYPFSPSAFNSFIHDNDYFCTAENAAGKIRSPNIRVKAVFREPYTVRVEDQRSMRGNVAVFKCLIPSSVQEYVSVVSWEKDTVSIIP

SEQ ID NO: 940 - DNA, 485 bp, Homo sapiens
actcgccgcagcctgcgcgccttctccagtccgcggtgccatggcccccgcccgtctgttcgcgctgctgctgttcttcgtaggcggagtcgccgagtcgatccgagagactgaggtcatcgacccccaggacctcctagaaggccgatacttctccggagccctaccagacgatgaggatgtagtggggcccgggcaggaatctgatgactttgagctgtctggctctggagatctggatgacttggaagactccatgatcggccctgaagttgtccatcccttggtgcctctagataaccatatccctgagagggcagggtctgggagccaagtccccaccgaacccaagaaactagaggagaatgaggttatccccaagagaatctcacccgttgaagagagtgaggatgtgtccaacaaggtgtcaatgtccagcactgtgcagggcagcaacatctttgagagaacggaggtcctggcag

SEQ ID NO: 941 - protein, 148 aa, Homo sapiens
MAPARLFALLLFFVGGVAESIRETEVIDPQDLLEGRYFSGALPDDEDVVGPGQESDDFELSGSGDLDDLEDSMIGPEVVHPLVPLDNHIPERAGSGSQVPTEPKKLEENEVIPKRISPVEESEDVSNKVSMSSTVQGSNIFERTEVLA

SEQ ID NO: 942 - DNA, 33 bp, Artificial Sequence
  T7 promoter
cagagatgcataatacgactcactatagggaga

1. A polynucleotide comprising
a PVALB nucleic acid sequence, or an allelic variant of the PVALB sequence, fused with an NRG1 nucleic acid sequence, or an allelic variant of the NRG1 sequence or
a ASPH nucleic acid sequence, or an allelic variant of the ASPH sequence, fused with an NRG1 nucleic acid sequence, or an allelic variant of the NRG1 sequence or
a DAAM1 nucleic acid sequence, or an allelic variant of the DAAM1 sequence, fused with an NRG1 nucleic acid sequence, or an allelic variant of the NRG1 sequence or
a ZFAT nucleic acid sequence, or an allelic variant of the ZFAT sequence, fused with an NRG1 nucleic acid sequence, or an allelic variant of the NRG1 sequence or
a DSCAML1 nucleic acid sequence, or an allelic variant of the DSCAML1 sequence, fused with an NRG1 nucleic acid sequence, or an allelic variant of the NRG1 sequence.

2. The polynucleotide according to claim 1, wherein
the PVALB nucleic acid sequence comprises or consists of any one of SEQ ID NOs: 439-444, or an allelic variant of any one of SEQ ID NOs: 439-444, and the NRG1 nucleic acid sequence comprises or consists of any one of SEQ ID NOs: 125-138;
the DAAM1 nucleic acid sequence comprises or consists of any one of SEQ ID NOs: 606-631, or an allelic variant of any one of SEQ ID NOs: 606-631, and the NRG1 nucleic acid sequence comprises or consists of any one of SEQ ID NOs: 125-138;
the ZFAT nucleic acid sequence comprises or consists of any one of SEQ ID NOs: 830-846, or an allelic variant of any one of SEQ ID NOs: 830-846, and the NRG1 nucleic acid sequence comprises or consists of any one of SEQ ID NOs: 125-138; or
the DSCAML1 nucleic acid sequence comprises or consists of any one of SEQ ID NOs: 870-903, or an allelic variant of any one of SEQ ID NOs: 870-903, and the NRG1 nucleic acid sequence comprises or consists of any one of SEQ ID NOs: 125-138.

3. The polynucleotide according to claim 1 or 2, wherein the PVALB, DAAM1, ZFAT or DSCAML1 nucleic acid sequence (or the allelic variant thereof), is 5′ to the NRG1 nucleic acid sequence (or the allelic variant thereof).

4. The polynucleotide according to any one of claims 1-3, wherein
the allelic variant of the PVALB nucleic acid sequences has at least 85% identity to any one of SEQ ID NOs: 439-444, preferably at least 90% identity, more preferably at least 95% sequence identity; and the allelic variant of the NRG1 nucleic acid sequences has at least 85% identity to any one of SEQ ID NOs: 125-138, preferably at least 90% identity, more preferably at least 95% sequence identity;
the allelic variant of the DAAM1 nucleic acid sequences has at least 85% identity to any one of SEQ ID NOs: 606-631, preferably at least 90% identity, more preferably at least 95% sequence identity; and the allelic variant of the NRG1 nucleic acid sequences has at least 85% identity to any one of SEQ ID NOs: 125-138, preferably at least 90% identity, more preferably at least 95% sequence identity;
the allelic variant of the ZFAT nucleic acid sequences has at least 85% identity to any one of SEQ ID NOs: 830-846, preferably at least 90% identity, more preferably at least 95% sequence identity; and the allelic variant of the NRG1 nucleic acid sequences has at least 85% identity to any one of SEQ ID NOs: 125-138, preferably at least 90% identity, more preferably at least 95% sequence identity; or
the allelic variant of the DSCAML1 nucleic acid sequences has at least 85% identity to any one of SEQ ID NOs: 870-903, preferably at least 90% identity, more preferably at least 95% sequence identity; and the allelic variant of the NRG1 nucleic acid sequences has at least 85% identity to any one of SEQ ID NOs: 125-138, preferably at least 90% identity, more preferably at least 95% sequence identity.

5. The polynucleotide according to any one of claims 1-4, wherein,
the fusion of the PVALB nucleic acid with the NRG1 nucleic acid comprises 2 to about 40 contiguous nucleic acids from SEQ ID NO: 437, preferably including the nucleic acids at positions 102 and 103;
the fusion of the DAAM1 nucleic acid with the NRG1 nucleic acid comprises 2 to about 40 contiguous nucleic acids from SEQ ID NO: 605, preferably including the nucleic acids at positions 75 and 76;
the fusion of the ZFAT nucleic acid with the NRG1 nucleic acid comprises 2 to about 40 contiguous nucleic acids from SEQ ID NO: 828, preferably including the nucleic acids at positions 75 and 76; or
the fusion of the DSCAML1 nucleic acid with the NRG1 nucleic acid comprises 2 to about 40 contiguous nucleic acids from SEQ ID NO: 868, preferably including the nucleic acids at positions 75 and 76.

6. The polynucleotide according to any one of claims 1-5, wherein the nucleic acid encoding the NRG1 protein sequence (or the allelic variant thereof), comprises or encodes an EGF-like domain of NRG1, preferably the EGF-like domain according to SEQ ID NO: 163.

7. A polynucleotide comprising:
a portion of exon 1 of VAPB, or of an allelic variant of exon 1, fused with a portion of exon 2 of NRG1, or an allelic variant of exon 2;
a portion of exon 7 of CADM1, or of an allelic variant of exon 7, and a portion of exon 6 of NRG1, or an allelic variant of exon 6;
a portion of exon 5 of CD44, or of an allelic variant of exon 5, and a portion of exon 2 of NRG1, or an allelic variant of exon 2;
a portion of exon 1 of transcript version 6 of SLC3A2, or of an allelic variant of exon 1, and a portion of exon 5 of NRG1, or an allelic variant of exon 5;
a portion of exon 2 of VTCN1, or of an allelic variant of exon 2, and a portion of exon 2 of NRG1, or an allelic variant of exon 2;
a portion of exon 11 of CDH1, or of an allelic variant of exon 11, and a portion of exon 2 of NRG1, or an allelic variant of exon 2;
a portion of exon 1 of CXADR, or of an allelic variant of exon 1, and a portion of exon 2 of NRG1, or an allelic variant of exon 2;
a portion of exon 2 of GTF2E2, or of an allelic variant of exon 1, and a portion of exon 2 of NRG1, or an allelic variant of exon 2;
a portion of exon 23 of CSMD1, or of an allelic variant of exon 23, and a portion of exon 6 of NRG1, or an allelic variant of exon 6;
a portion of exon 4 of PTN, or of an allelic variant of exon 4, and a portion of exon 2 of NRG1, or an allelic variant of exon 2;
a portion of exon 11 of ST14, or of an allelic variant of exon 11, and a portion of exon 6 of NRG1, or an allelic variant of exon 6;
a portion of exon 9 of THBS1, or of an allelic variant of exon 9, and a portion of exon 6 of NRG1, or an allelic variant of exon 6;
· a portion of exon 12 of AGRN, or of an allelic variant of exon 12, and a portion of exon 6 of NRG1, or an allelic variant of exon 6;
a portion of exon 4 of PVALB, or of an allelic variant of exon 4, and a portion of exon 6 of NRG1, or an allelic variant of exon 6,
a portion of exon 2 of transcript version 3 of SLC3A2, or of an allelic variant of exon 2, and a portion of exon 6 of NRG1, or an allelic variant of exon 6;
a portion of exon 14 of APP, or of an allelic variant of exon 14, and a portion of exon 6 of NRG1, or an allelic variant of exon 6;
a portion of exon 33 of WRN, or of an allelic variant of exon 33, and a portion of exon 6 of NRG1, or an allelic variant of exon 6;
a portion of exon 1 of DAAM1, or of an allelic variant of exon 1, and a portion of exon 1 of NRG1, or an allelic variant of exon 1;
a portion of exon 22 of ASPH, or of an allelic variant of exon 22, and a portion of exon 2 of NRG1, or an allelic variant of exon 2;
a portion of exon 6 of NOTCH2, or of an allelic variant of exon 6, and a portion of exon 6 of NRG1, or an allelic variant of exon 6;
a portion of exon 2 of CD74, or of an allelic variant of exon 2, and a portion of exon 2 of NRG1, or an allelic variant of exon 2;
a portion of exon 2 of SDC4, or of an allelic variant of exon 2, and a portion of exon 2 of NRG1, or an allelic variant of exon 2;
a portion of exon 5 of CD44, or of an allelic variant of exon 5, and a portion of exon 6 of NRG1, or an allelic variant of exon 6;
a portion of exon 14 of SLC4A4, or of an allelic variant of exon 14, and a portion of exon 6 of NRG1, or an allelic variant of exon 6;
a portion of exon 4 of SDC4, or of an allelic variant of exon 4, and a portion of exon 2 of NRG1, or an allelic variant of exon 2;
a portion of exon 12 of ZFAT, or of an allelic variant of exon 12, and a portion of exon 6 of NRG1, or an allelic variant of exon 6, or
a portion of exon 3 of DSCAML1, or of an allelic variant of exon 3, and a portion of exon 2 of NRG1, or an allelic variant of exon 2.

8. The polynucleotide according to claim 7, wherein exon 1 of VAPB is that of SEQ ID NO: 17; exon 7 of CADM1 is that of SEQ ID NO: 39; exon 5 of CD44 is that of SEQ ID NO: 65; exon 1 of SLC3A2 is that of SEQ ID NO: 103; exon 2 of VTCN1 is that of SEQ ID NO: 169; exon 11 of CDH1 is that of SEQ ID NO: 198; exon 1 of CXADR is that of SEQ ID NO: 219; exon 2 of GTF2E2 is that of SEQ ID NO: 236; exon 23 of CSMD1 is that of SEQ ID NO: 279; exon 4 of PTN is that of SEQ ID NO: 318; exon 11 of ST14 is that of SEQ ID NO: 342; exon 9 of THBS1 is that of SEQ ID NO: 386; exon 12 of AGRN is that of SEQ ID NO: 416; exon 4 of PVALB is that of SEQ ID NO: 442; exon 2 of SLC3A2 is that of SEQ ID NO: 457; exon 14 of APP is that of SEQ ID NO: 501; exon 33 of WRN is that of SEQ ID NO: 562; exon 1 of DAAM1 is that of SEQ ID NO: 606; exon 22 of ASPH is that of SEQ ID NO: 658; exon 6 of NOTCH2 is that of SEQ ID NO: 700; exon 2 of CD74 is that of SEQ ID NO: 720; exon 2 of SDC4 is that of SEQ ID NO: 746; exon 5 of CD44 is that of SEQ ID NO: 65; exon 14 of SLC4A4 is that of SEQ ID NO: 780; exon 4 of SDC4 is that of SEQ ID NO: 748; exon 12 of ZFAT is that of SEQ ID NO: 841; exon 3 of DSCAML1 is that of SEQ ID NO: 872 and exons 1, 2, 5 and 6 of NRG1 are those of SEQ ID NOs: 125, 126, 129 and 130, respectively.

9. The polynucleotide according to any one of claim 7 or 8, wherein:
the portion of exon 1 of VAPB, or the allelic variant thereof, is 5′ to the portion of exon 2 of NRG1, or the allelic variant thereof;
the portion of exon 7 of CADM1, or the allelic variant thereof, is 5′ to the portion of exon 6 of NRG1, or the allelic variant thereof;
the portion of exon 5 of CD44, or the allelic variant thereof, is 5′ to the portion of exon 2 of NRG1, or the allelic variant thereof;
the portion of exon 1 of SLC3A2, or the allelic variant thereof, is 5′ to the portion of exon 5 of NRG1, or the allelic variant thereof;
the portion of exon 2 of VTCN1, or the allelic variant thereof, is 5′ to the portion of exon 2 of NRG1, or the allelic variant thereof;
the portion of exon 11 of CDH1, or the allelic variant thereof, is 5′ to the portion of exon 2 of NRG1, or the allelic variant thereof;
the portion of exon 1 of CXADR, or the allelic variant thereof, is 5′ to the portion of exon 2 of NRG1, or the allelic variant thereof;
the portion of exon 2 of GTF2E2, or the allelic variant thereof, is 5′ to the portion of exon 2 of NRG1, or the allelic variant thereof;
the portion of exon 23 CSMD1, or the allelic variant thereof, is 5′ to the portion of exon 6 of NRG1, or the allelic variant thereof;
the portion of exon 4 of PTN, or the allelic variant thereof, is 5′ to the portion of exon 2 of NRG1, or the allelic variant thereof;
the portion of exon 11 of ST14, or the allelic variant thereof, is 5′ to the portion of exon 6 of NRG1, or the allelic variant thereof;
the portion of exon 9 of THBS1, or the allelic variant thereof, is 5′ to the portion of exon 6 of NRG1, or the allelic variant thereof;
the portion of exon 12 of AGRN, or the allelic variant thereof, is 5′ to the portion of exon 6 of NRG1, or the allelic variant thereof;
the portion of exon 4 of PVALB, or the allelic variant thereof, is 5′ to the portion of exon 6 of NRG1, or the allelic variant thereof;
the portion of exon 2 of SCL3A2, or the allelic variant thereof, is 5′ to the portion of exon 6 of NRG1, or the allelic variant thereof;
the portion of exon 14 of APP, or the allelic variant thereof, is 5′ to the portion of exon 6 of NRG1, or the allelic variant of exon 6;
the portion of exon 33 of WRN, or the allelic variant thereof, is 5′ to the portion of exon 6 of NRG1, or the allelic variant of exon 6;
the portion of exon 1 of DAAM1, or the allelic variant thereof, is 5′ to the portion of exon 1 of NRG1, or the allelic variant of exon 1;
the portion of exon 22 of ASPH, or the allelic variant thereof, is 5′ to the portion of exon 2 of NRG1, or the allelic variant of exon 2;
the portion of exon 6 of NOTCH2, or the allelic variant thereof, is 5′ to the portion of exon 6 of NRG1, or the allelic variant of exon 6;
the portion of exon 2 of CD74, or the allelic variant thereof, is 5′ to the portion of exon 2 of NRG1, or the allelic variant of exon 2;
the portion of exon 2 of SDC4, or the allelic variant thereof, is 5′ to the portion of exon 2 of NRG1, or the allelic variant of exon 2;
the portion of exon 5 of CD44, or the allelic variant thereof, is 5′ to the portion of exon 6 of NRG1, or the allelic variant of exon 6;
the portion of exon 14 of SLC4A4, or the allelic variant thereof, is 5′ to the portion of exon 6 of NRG1, or the allelic variant of exon 6;
a portion of exon 4 of SDC4, or the allelic variant thereof, is 5′ to the portion of exon 2 of NRG1, or the allelic variant of exon 2;
the portion of exon 12 of ZFAT, or the allelic variant thereof, is 5′ to the portion of exon 6 of NRG1, or the allelic variant of exon 6, and
the portion of exon 3 of DSCAML1, or the allelic variant thereof, is 5′ to the portion of exon 2 of NRG1, or the allelic variant of exon 2.

10. The polynucleotide according to any one of claims 7-9, wherein:
the allelic variant of exon 1 of VAPB has at least 85% identity to SEQ ID NO: 17, preferably at least 90%, 92%, 94%, 96% or even 98% identity thereto;
the allelic variant of exon 7 of CADM1 has at least 85% identity to SEQ ID NO: 39, preferably at least 90%, 92%, 94%, 96% or even 98% identity thereto;
the allelic variant of exon 5 of CD44 has at least 85% identity to SEQ ID NO: 65, preferably at least 90%, 92%, 94%, 96% or even 98% identity thereto;
the allelic variant of exon 1 of SLC3A2 has at least 85% identity to SEQ ID NO: 103, preferably at least 90%, 92%, 94%, 96% or even 98% identity thereto;
the allelic variant of exon 2 of VTCN1 has at least 85% identity to SEQ ID NO: 169, preferably at least 90%, 92%, 94%, 96% or even 98% identity thereto;
the allelic variant of exon 11 of CDH1 has at least 85% identity to SEQ ID NO: 198, preferably at least 90%, 92%, 94%, 96% or even 98% identity thereto;
the allelic variant of exon 2 of NRG1 has at least 85% identity to SEQ ID NO: 126, preferably at least 90%, 92%, 94%, 96% or even 98% identity thereto;
the allelic variant of exon 5 of NRG1 has at least 85% identity to SEQ ID NO: 129, preferably at least 90%, 92%, 94%, 96% or even 98% identity thereto;
the allelic variant of exon 6 of NRG1 has at least 85% identity to SEQ ID NO: 130, preferably at least 90%, 92%, 94%, 96% or even 98% identity thereto;
the allelic variant of exon 1 of CXADR has at least 85% identity to SEQ ID NO: 219, preferably at least 90%, 92%, 94%, 96% or even 98% identity thereto;
the allelic variant of exon 2 of GTF2E2 has at least 85% identity to SEQ ID NO: 236, preferably at least 90%, 92%, 94%, 96% or even 98% identity thereto;
the allelic variant of exon 23 of CSMD1 has at least 85% identity to SEQ ID NO: 279, preferably at least 90%, 92%, 94%, 96% or even 98% identity thereto;
the allelic variant of exon 4 of PTN has at least 85% identity to SEQ ID NO: 318, preferably at least 90%, 92%, 94%, 96% or even 98% identity thereto;
the allelic variant of exon 11 of ST14 has at least 85% identity to SEQ ID NO: 342, preferably at least 90%, 92%, 94%, 96% or even 98% identity thereto;
the allelic variant of exon 9 of THBS1 has at least 85% identity to SEQ ID NO: 386, preferably at least 90%, 92%, 94%, 96% or even 98% identity thereto;
the allelic variant of exon 12 of AGRN has at least 85% identity to SEQ ID NO: 416, preferably at least 90%, 92%, 94%, 96% or even 98% identity thereto;
the allelic variant of exon 4 of PVALB has at least 85% identity to SEQ ID NO: 442, preferably at least 90%, 92%, 94%, 96% or even 98% identity thereto;
the allelic variant of exon 2 of SCL3A2 has at least 85% identity to SEQ ID NO: 457, preferably at least 90%, 92%, 94%, 96% or even 98% identity thereto;
the allelic variant of exon 14 of APP has at least 85% identity to SEQ ID NO: 501, preferably at least 90%, 92%, 94%, 96% or even 98% identity thereto;
the allelic variant of exon 33 of WRN has at least 85% identity to SEQ ID NO: 562, preferably at least 90%, 92%, 94%, 96% or even 98% identity thereto;
the allelic variant of exon 1 of DAAM1 has at least 85% identity to SEQ ID NO: 606, preferably at least 90%, 92%, 94%, 96% or even 98% identity thereto;
the allelic variant of exon 1 of NRG1 has at least 85% identity to SEQ ID NO: 125, preferably at least 90%, 92%, 94%, 96% or even 98% identity thereto;
the allelic variant of exon 22 of ASPH has at least 85% identity to SEQ ID NO: 658, preferably at least 90%, 92%, 94%, 96% or even 98% identity thereto;
the allelic variant of exon 6 of NOTCH2 has at least 85% identity to SEQ ID NO: 700, preferably at least 90%, 92%, 94%, 96% or even 98% identity thereto;
the allelic variant of exon 2 of CD74 has at least 85% identity to SEQ ID NO: 720, preferably at least 90%, 92%, 94%, 96% or even 98% identity thereto;
the allelic variant of exon 2 of SDC4 has at least 85% identity to SEQ ID NO: 746, preferably at least 90%, 92%, 94%, 96% or even 98% identity thereto;
the allelic variant of exon 5 of CD44 has at least 85% identity to SEQ ID NO: 65, preferably at least 90%, 92%, 94%, 96% or even 98% identity thereto;
the allelic variant of exon 14 of SLC4A4 has at least 85% identity to SEQ ID NO: 780, preferably at least 90%, 92%, 94%, 96% or even 98% identity thereto;
the allelic variant of exon 4 of SDC4 has at least 85% identity to SEQ ID NO: 748, preferably at least 90%, 92%, 94%, 96% or even 98% identity thereto;
the allelic variant of exon 12 of ZFAT has at least 85% identity to SEQ ID NO: 841, preferably at least 90%, 92%, 94%, 96% or even 98% identity thereto; and
the allelic variant of exon 3 of DSCAML1 has at least 85% identity to SEQ ID NO: 872, preferably at least 90%, 92%, 94%, 96% or even 98% identity thereto.

11. The polynucleotide according to any one of claims 7-10, wherein:
the fusion of VAPB with NRG1 comprises 2 to about 40 contiguous nucleic acids from SEQ ID NO: 3, including the nucleic acids at position 43 and 44;
the fusion of CADM1 with NRG1 comprises 2 to about 40 contiguous nucleic acids from SEQ ID NO: 7, including the nucleic acids at position 53 and 54;
the fusion of CD44 with NRG1 comprises 2 to about 40 contiguous nucleic acids from SEQ ID NO: 11, including the nucleic acids at position 52 and 53;
the fusion of SLC3A2 with NRG1 comprises 2 to about 40 contiguous nucleic acids from SEQ ID NO: 15, including the nucleic acids at position 53 and 54;
the fusion of VTCN1 with NRG1 comprises 2 to about 40 contiguous nucleic acids from SEQ ID NO: 166, including the nucleic acids at position 65 and 66;
the fusion of CDH1 with NRG1 comprises 2 to about 40 contiguous nucleic acids from SEQ ID NO: 186, including the nucleic acids at position 119 and 120;
the fusion of CXADR with NRG1 comprises 2 to about 40 contiguous nucleic acids from SEQ ID NO: 217, including the nucleic acids at position 43 and 44;
the fusion of GTF2E2 with NRG1 comprises 2 to about 40 contiguous nucleic acids from SEQ ID NO: 233, including the nucleic acids at position 141 and 142;
the fusion of CSMD1 with NRG1 comprises 2 to about 40 contiguous nucleic acids from SEQ ID NO: 255, including the nucleic acids at position 88 and 89;
the fusion of PTN with NRG1 comprises 2 to about 40 contiguous nucleic acids from SEQ ID NO: 313, including the nucleic acids at position 102 and 103;
the fusion of ST14 with NRG1 comprises 2 to about 40 contiguous nucleic acids from SEQ ID NO: 330, including the nucleic acids at position 95 and 96;
the fusion of THBS1 with NRG1 comprises 2 to about 40 contiguous nucleic acids from SEQ ID NO: 376, including the nucleic acids at position 56 and 57;
the fusion of AGRN with NRG1 comprises 2 to about 40 contiguous nucleic acids from SEQ ID NO: 403, including the nucleic acids at position 106 and 107;
the fusion of PVALB with NRG1 comprises 2 to about 40 contiguous nucleic acids from SEQ ID NO: 437, including the nucleic acids at position 102 and 103;
the fusion of SLC3A2 with NRG1 comprises 2 to about 40 contiguous nucleic acids from SEQ ID NO: 454, including the nucleic acids at position 93 and 94;
the fusion of APP with NRG1 comprises 2 to about 40 contiguous nucleic acids from SEQ ID NO: 486, including the nucleic acids at position 54 and 55;
the fusion of WRN with NRG1 comprises 2 to about 40 contiguous nucleic acids from SEQ ID NO: 528, including the nucleic acids at position 96 and 97;
the fusion of DAAM1 with NRG1 comprises 2 to about 40 contiguous nucleic acids from SEQ ID NO: 605, including the nucleic acids at position 75 and 76;
the fusion of ASPH with NRG1 comprises 2 to about 40 contiguous nucleic acids from SEQ ID NO: 635, including the nucleic acids at position 75 and 76;
the fusion of NOTCH2 with NRG1 comprises 2 to about 40 contiguous nucleic acids from SEQ ID NO: 693, including the nucleic acids at position 75 and 76;
the fusion of CD74 with NRG1 comprises 2 to about 40 contiguous nucleic acids from SEQ ID NO: 717, including the nucleic acids at position 75 and 76;
the fusion of SDC4 with NRG1 comprises 2 to about 40 contiguous nucleic acids from SEQ ID NO: 743, including the nucleic acids at position 75 and 76;
the fusion of CD44 with NRG1 comprises 2 to about 40 contiguous nucleic acids from SEQ ID NO: 761, including the nucleic acids at position 75 and 76;
the fusion of SLC4A4 with NRG1 comprises 2 to about 40 contiguous nucleic acids from SEQ ID NO: 765, including the nucleic acids at position 75 and 76;
the fusion of SDC4 with NRG1 comprises 2 to about 40 contiguous nucleic acids from SEQ ID NO: 824, including the nucleic acids at position 75 and 76;
the fusion of ZFAT with NRG1 comprises 2 to about 40 contiguous nucleic acids from SEQ ID NO: 828, including the nucleic acids at position 75 and 76; and
the fusion of DSCAML1 with NRG1 comprises 2 to about 40 contiguous nucleic acids from SEQ ID NO: 868, including the nucleic acids at position 75 and 76.

12. The polynucleotide according to any one of claims 7-11, wherein:
the fusion of VAPB with NRG1 comprises SEQ ID NO: 3, or an allelic variant thereof;
the fusion of CADM1 with NRG1 comprises SEQ ID NO: 7, or an allelic variant thereof;
the fusion of CD44 with NRG1 comprises SEQ ID NO: 11, or an allelic variant thereof;
the fusion of SLC3A2 with NRG1 comprises SEQ ID NO: 15, or an allelic variant thereof;
the fusion of VTCN1 with NRG1 comprises SEQ ID NO: 166, or an allelic variant thereof;
the fusion of CDH1 with NRG1 comprises SEQ ID NO: 186, or an allelic variant thereof;
the fusion of CXADR with NRG1 comprises SEQ ID NO: 217, or an allelic variant thereof;
the fusion of GTF2E2 with NRG1 comprises SEQ ID NO: 233, or an allelic variant thereof;
the fusion of CSMD1 with NRG1 comprises SEQ ID NO: 255, or an allelic variant thereof;
the fusion of PTN with NRG1 comprises SEQ ID NO: 313, or an allelic variant thereof;
the fusion of ST14 with NRG1 comprises SEQ ID NO: 330, or an allelic variant thereof;
the fusion of THBS1 with NRG1 comprises SEQ ID NO: 376, or an allelic variant thereof;
the fusion of AGRN with NRG1 comprises SEQ ID NO: 403, or an allelic variant thereof;
the fusion of PVALB with NRG1 comprises SEQ ID NO: 437, or an allelic variant thereof;
the fusion of SLC3A2 with NRG1 comprises SEQ ID NO: 454, or an allelic variant thereof;
the fusion of APP with NRG1 comprises SEQ ID NO: 486, or an allelic variant thereof;
the fusion of WRN with NRG1 comprises SEQ ID NO: 528, or an allelic variant thereof;
the fusion of DAAM1 with NRG1 comprises SEQ ID NO: 605, or an allelic variant thereof;
the fusion of ASPH with NRG1 comprises SEQ ID NO: 635, or an allelic variant thereof;
the fusion of NOTCH2 with NRG1 comprises SEQ ID NO: 693, or an allelic variant thereof;
the fusion of CD74 with NRG1 comprises SEQ ID NO: 717, or an allelic variant thereof;
the fusion of SDC4 with NRG1 comprises SEQ ID NO: 743, or an allelic variant thereof;
the fusion of CD44 with NRG1 comprises SEQ ID NO: 761, or an allelic variant thereof;
the fusion of SLC4A4 with NRG1 comprises SEQ ID NO: 765, or an allelic variant thereof;
the fusion of SDC4 with NRG1 comprises SEQ ID NO: 824, or an allelic variant thereof;
the fusion of ZFAT with NRG1 comprises SEQ ID NO: 828, or an allelic variant thereof; and
the fusion of DSCAML1 with NRG1 comprises SEQ ID NO: 868, or an allelic variant thereof.

13. The polynucleotide according to any one of claims 7-12, wherein:
the portion of exon 1 of VAPB is or comprises SEQ ID NO: 1, or an allelic variant SEQ ID NO: 1;
the portion of exon 7 of CADM1 is or comprises SEQ ID NO: 5, or an allelic variant of SEQ ID NO: 5;
the portion of exon 5 of CD44 is or comprises SEQ ID NO: 9, or an allelic variant SEQ ID NO: 9;
the portion of exon 1 of SLC3A2 is or comprises SEQ ID NO: 13, or an allelic variant SEQ ID NO: 13;
the portion of exon 2 of VTCN1 is or comprises SEQ ID NO: 164, or an allelic variant SEQ ID NO: 164;
the portion of exon 11 of CDH1 is or comprises SEQ ID NO: 184, or an allelic variant SEQ ID NO: 184;
the portion of exon 1 of CXADR is or comprises SEQ ID NO: 215, or an allelic variant SEQ ID NO: 215;
the portion of exon 2 of GTF2E2 is or comprises SEQ ID NO: 231, or an allelic variant SEQ ID NO: 231;
the portion of exon 23 of CSMD1 is or comprises SEQ ID NO: 253, or an allelic variant SEQ ID NO: 253;
the portion of exon 4 of PTN is or comprises SEQ ID NO: 311, or an allelic variant SEQ ID NO: 311;
the portion of exon 11 of ST14 is or comprises SEQ ID NO:328, or an allelic variant SEQ ID NO: 328;
the portion of exon 9 of THBS1 is or comprises SEQ ID NO: 374, or an allelic variant SEQ ID NO: 374;
the portion of exon 12 of AGRN is or comprises SEQ ID NO: 401, or an allelic variant SEQ ID NO: 401;
the portion of exon 4 of PVALB is or comprises SEQ ID NO: 435, or an allelic variant SEQ ID NO: 435;
the portion of exon 2 of SLC3A2 is or comprises SEQ ID NO: 452, or an allelic variant SEQ ID NO: 452;
the portion of exon 2 of NRG1 is or comprises SEQ ID NO: 165, or an allelic variant SEQ ID NO: 165;
the portion of exon 5 of NRG1 is or comprises SEQ ID NO: 14, or an allelic variant SEQ ID NO: 14;
the portion of exon 6 of NRG1 is or comprises SEQ ID NO: 6, or an allelic variant thereof;
the portion of exon 14 of APP is or comprises SEQ ID NO: 484, or an allelic variant thereof;
the portion of exon 33 of WRN is or comprises SEQ ID NO: 526, or an allelic variant thereof;
the portion of exon 1 of DAAM1 is or comprises SEQ ID NO: 603, or an allelic variant thereof;
the portion of exon 22 of ASPH is or comprises SEQ ID NO: 633, or an allelic variant thereof;
the portion of exon 6 of NOTCH2 is or comprises SEQ ID NO: 691, or an allelic variant thereof;
the portion of exon 2 of CD74 is or comprises SEQ ID NO: 715, or an allelic variant thereof;
the portion of exon 2 of SDC4 is or comprises SEQ ID NO: 741, or an allelic variant thereof;
the portion of exon 5 of CD44 is or comprises SEQ ID NO: 759, or an allelic variant thereof;
the portion of exon 14 of SLC4A4 is or comprises SEQ ID NO: 763, or an allelic variant thereof;
a portion of exon 4 of SDC4 is or comprises SEQ ID NO: 822, or an allelic variant thereof;
the portion of exon 12 of ZFAT is or comprises SEQ ID NO: 826, or an allelic variant thereof,
the portion of exon 3 of DSCAML1 is or comprises SEQ ID NO: 866, or an allelic variant thereof; and
the portion of exon 1 of NRG1 is or comprises SEQ ID NO: 604, or an allelic variant thereof.

14. The polynucleotide according to any one of claims 7-12, wherein:
the fusion of VAPB with NRG1 comprises a fusion junction between exon 1 of VAPB and exon 2 of NRG1, preferably the junction between the nucleic acids at position 43 of VAPB and at position 44 of NRG1 of SEQ ID NO: 3;
the fusion of CADM1 with NRG1 comprises a fusion junction between exon 7 of CADM1 and exon 6 of NRG1, preferably the junction between the nucleic acids at position 53 of CADM1 and at position 54 of NRG1 of SEQ ID NO: 7;
the fusion of CD44 with NRG1 comprises a fusion junction between exon 5 of CD44 and exon 2 of NRG1, preferably the junction between the nucleic acids at position 52 of CD44 and at position 53 of NRG1 of SEQ ID NO: 11;
the fusion of SLC3A2 with NRG1 comprises a fusion junction between exon 1 of SLC3A2 and exon 5 of NRG1, preferably the junction between the nucleic acids at position 53 of SLC3A2 and at position 54 of NRG1 of SEQ ID NO: 15;
the fusion of VTCN1 with NRG1 comprises a fusion junction between exon 2 of VTCN1 and exon 2 of NRG1, preferably the junction between the nucleic acids at position 65 of VTCN1 and at position 66 of NRG1 of SEQ ID NO: 166;
the fusion of CDH1 with NRG1 comprises a fusion junction between exon 11 of CDH1 and exon 2 of NRG1, preferably the junction between the nucleic acids at position 119 of CDH1 and at position 120 of NRG1 of SEQ ID NO: 186
the fusion of CXADR with NRG1 comprises a fusion junction between exon 1 of CXADR and exon 2 of NRG1, preferably the junction between the nucleic acids at position 43 of CXADR and at position 44 of NRG1 of SEQ ID NO: 217;
the fusion of GTF2E2 with NRG1 comprises a fusion junction between exon 2 of GTF2E2 and exon 2 of NRG1, preferably the junction between the nucleic acids at position 141 of GTF2E2 and at position 142 of NRG1 of SEQ ID NO: 233;
the fusion of CSMD1 with NRG1 comprises a fusion junction between exon 23 of CSMD1 and exon 6 of NRG1, preferably the junction between the nucleic acids at position 88 of CSMD1 and at position 89 of NRG1 of SEQ ID NO: 255;
the fusion of PTN with NRG1 comprises a fusion junction between exon 4 of PTN and exon 2 of NRG1, preferably the junction between the nucleic acids at position 102 of PTN and at position 103 of NRG1 of SEQ ID NO: 313;
the fusion of ST14 with NRG1 comprises a fusion junction between exon 11 of ST14 and exon 6 of NRG1, preferably the junction between the nucleic acids at position 95 of ST14 and at position 96 of NRG1 of SEQ ID NO: 330;
the fusion of THBS1 with NRG1 comprises a fusion junction between exon 9 of THBS1 and exon 6 of NRG1, preferably the junction between the nucleic acids at position 56 of THBS1 and at position 57 of NRG1 of SEQ ID NO: 376;
the fusion of AGRN with NRG1 comprises a fusion junction between exon 12 of AGRN and exon 6 of NRG1, preferably the junction between the nucleic acids at position 106 of AGRN and at position 107 of NRG1 of SEQ ID NO: 403;
the fusion of PVALB with NRG1 comprises a fusion junction between exon 4 of PVALB and exon 6 of NRG1, preferably the junction between the nucleic acids at position 102 of PVALB and at position 103 of NRG1 of SEQ ID NO: 437;
the fusion of SLC3A2 with NRG1 comprises a fusion junction between exon 2 of SLC3A2 and exon 6 of NRG1, preferably the junction between the nucleic acids at position 93 of SLC3A2 and at position 94 of NRG1 of SEQ ID NO: 454;
the fusion of APP with NRG1 comprises a fusion junction between exon 14 of APP and exon 6 of NRG1, preferably the junction between the nucleic acids at position 54 of APP and at position 55 of NRG1 of SEQ ID NO: 486;
the fusion of WRN with NRG1 comprises a fusion junction between exon 33 of WRN and exon 6 of NRG1, preferably the junction between the nucleic acids at position 96 of WRN and at position 97 of NRG1 of SEQ ID NO: 528;
the fusion of DAAM1 with NRG1 comprises a fusion junction between exon 1 of DAAM1 and exon 1 of NRG1, preferably the junction between the nucleic acids at position 75 of DAAM1 and at position 76 of NRG1 of SEQ ID NO: 605;
the fusion of ASPH with NRG1 comprises a fusion junction between exon 22 of ASPH and exon 2 of NRG1, preferably the junction between the nucleic acids at position 75 of ASPH and at position 76 of NRG1 of SEQ ID NO: 635;
the fusion of NOTCH2 with NRG1 comprises a fusion junction between exon 6 of NOTCH2 and exon 6 of NRG1, preferably the junction between the nucleic acids at position 75 of NOTCH2 and at position 76 of NRG1 of SEQ ID NO: 693;
the fusion of CD74 with NRG1 comprises a fusion junction between exon 2 of CD74 and exon 2 of NRG1, preferably the junction between the nucleic acids at position 75 of CD74 and at position 76 of NRG1 of SEQ ID NO: 717;
the fusion of SDC4 with NRG1 comprises a fusion junction between exon 2 of SDC4 and exon 2 of NRG1, preferably the junction between the nucleic acids at position 75 of SDC4 and at position 76 of NRG1 of SEQ ID NO: 743;
the fusion of CD44 with NRG1 comprises a fusion junction between exon 5 of CD44 and exon 6 of NRG1, preferably the junction between the nucleic acids at position 75 of CD44 and at position 76 of NRG1 of SEQ ID NO: 761;
the fusion of SLC4A4 with NRG1 comprises a fusion junction between exon 14 of SLC4A4 and exon 6 of NRG1, preferably the junction between the nucleic acids at position 75 of SLC4A4 and at position 76 of NRG1 of SEQ ID NO: 765;
the fusion of SDC4 with NRG1 comprises a fusion junction between exon 4 of SDC4 and exon 2 of NRG1, preferably the junction between the nucleic acids at position 75 of SDC4 and at position 76 of NRG1 of SEQ ID NO: 824;
the fusion of ZFAT with NRG1 comprises a fusion junction between exon 12 of ZFAT and exon 6 of NRG1, preferably the junction between the nucleic acids at position 75 of ZFAT and at position 76 of NRG1 of SEQ ID NO: 828; and
the fusion of DSCAML1 with NRG1 comprises a fusion junction between exon 3 of DSCAML1 and exon 2 of NRG1, preferably the junction between the nucleic acids at position 75 of DSCAML1 and at position 76 of NRG1 of SEQ ID NO: 868.

15. The polynucleotide according to any one of the previous claims, wherein the polynucleotide is isolated or purified.

16. The polynucleotide according to any one of the previous claims, wherein any one of the fusions is an in-frame fusion.

17. The polynucleotide according to any one of the previous claims, wherein the polynucleotide is a mammalian polynucleotide, preferably a human polynucleotide.

18. A polypeptide fusion encoded by the polynucleotide according to any one of the previous claims.

19. A vector comprising the polynucleotide according to any one of claims 1-17.

20. A recombinant host cell comprising the polynucleotide of any of claims 1-17 or the vector of claim 19.

21. A method of making the polypeptide fusion of claim 18, comprising maintaining the host cell of claim 20 under conditions suitable for expression of the polynucleotide comprised by the host cell, whereby the polynucleotide is expressed and a polypeptide fusion is produced, followed by isolating or purifying the polypeptide fusion.

22. A method for making a recombinant host cell comprising introducing the vector of claim 19 into a host cell.

23. A detection assay comprising a nucleic acid probe, primer or primer pair for detection of the presence of a polynucleotide fusion according to any one of claims 1-17.

24. A nucleic acid probe, primer or primer pair for detection of a polynucleotide fusion according to any of the claims 1-17.

25. The nucleic acid probe, primer or primer pair of claim 24, having a length of 10-40 nucleotides.

26. The nucleic acid probe, primer or primer pair of claim 24 or 25, wherein the fusion as detected comprises:
the fusion of VAPB with NRG1 comprising or consisting of SEQ ID NO: 3, and preferably includes the nucleic acids at position 43 and 44;
the fusion of CADM1 with NRG1 comprising or consisting of SEQ ID NO: 7, and preferably includes the nucleic acids at position 53 and 54;
the fusion of CD44 with NRG1 comprising or consisting of SEQ ID NO: 11, and preferably includes the nucleic acids at position 52 and 53;
the fusion of SLC3A2 with NRG1 comprising or consisting of SEQ ID NO: 15, and preferably includes the nucleic acids at position 53 and 54;
the fusion of VTCN1 with NRG1 comprising or consisting of SEQ ID NO: 166, and preferably includes the nucleic acids at position 65 and 66;
the fusion of CDH1 with NRG1 comprising or consisting of SEQ ID NO: 186, and preferably includes the nucleic acids at position 119 and 120;
the fusion of CXADR with NRG1 comprising or consisting of SEQ ID NO: 217, and preferably includes the nucleic acids at position 43 and 44;
the fusion of GTF2E2 with NRG1 comprising or consisting of SEQ ID NO: 233, and preferably includes the nucleic acids at position 141 and 142;
the fusion of CSMD1 with NRG1 comprising or consisting of SEQ ID NO: 255, and preferably includes the nucleic acids at position 88 and 89;
the fusion of PTN with NRG1 comprising or consisting of SEQ ID NO: 313, and preferably includes the nucleic acids at position 102 and 103;
the fusion of ST14 with NRG1 comprising or consisting of SEQ ID NO: 330, and preferably includes the nucleic acids at position 95 and 96;
the fusion of THBS1 with NRG1 comprising or consisting of SEQ ID NO: 376, and preferably includes the nucleic acids at position 56 and 57;
the fusion of AGRN with NRG1 comprising or consisting of SEQ ID NO: 403, and preferably includes the nucleic acids at position 106 and 107;
the fusion of PVALB with NRG1 comprising or consisting of SEQ ID NO: 437, and preferably includes the nucleic acids at position 102 and 103;
the fusion of SLC3A2 with NRG1 comprising or consisting of SEQ ID NO: 454, and preferably includes the nucleic acids at position 93 and 94;
the fusion of APP with NRG1 comprising or consisting of SEQ ID NO: 486, and preferably includes the nucleic acids at position 54 and 55;
the fusion of WRN with NRG1 comprising or consisting of SEQ ID NO: 528, and preferably includes the nucleic acids at position 96 and 97;
the fusion of DAAM1 with NRG1 comprising or consisting of SEQ ID NO: 605, and preferably includes the nucleic acids at position 75 and 76;
the fusion of ASPH with NRG1 comprising or consisting of SEQ ID NO: 635, and preferably includes the nucleic acids at position 75 and 76;
the fusion of NOTCH2 with NRG1 comprising or consisting of SEQ ID NO: 693, and preferably includes the nucleic acids at position 75 and 76;
the fusion of CD74 with NRG1 comprising or consisting of SEQ ID NO: 717, and preferably includes the nucleic acids at position 75 and 76;
the fusion of SDC4 with NRG1 comprising or consisting of SEQ ID NO: 743, and preferably includes the nucleic acids at position 75 and 76;
the fusion of CD44 with NRG1 comprising or consisting of SEQ ID NO: 761, and preferably includes the nucleic acids at position 75 and 76;
the fusion of SLC4A4 with NRG1 comprising or consisting of SEQ ID NO: 765, and preferably includes the nucleic acids at position 75 and 76;
the fusion of SDC4 with NRG1 comprising or consisting of SEQ ID NO: 824, and preferably includes the nucleic acids at position 75 and 76;
the fusion of ZFAT with NRG1 comprising or consisting of SEQ ID NO: 828, and preferably includes the nucleic acids at position 75 and 76; and
the fusion of DSCAML1 with NRG1 comprising or consisting of SEQ ID NO: 868, and preferably includes the nucleic acids at position 75 and 76.

27. The nucleic acid probe, primer or primer pair of any one of claims 24-26, wherein:
the probe, primer or primer pair for detection of the fusion of VAPB with NRG1 specifically hybridizes to, or has 95% or more complementary sequence identity with, a sequence comprised by exon 1 from VAPB or a sequence located 5′ of exon 1 and/or to a sequence comprised by exon 2 from NRG1, or a sequence located 3′ of exon 2;
the probe, primer or primer pair for detection of the fusion of CADM1 with NRG1 specifically hybridizes to, or has 95% or more complementary sequence identity with, a sequence comprised by exon 7 from CADM1, or a sequence located 5′ of exon 7 and/or to a sequence comprised by exon 6 from NRG1, or a sequence located 3′ of exon 6;
the probe, primer or primer pair for detection of the fusion of CD44 with NRG1 specifically hybridizes to, or has 95% or more complementary sequence identity with, a sequence comprised by exon 5 from CD44, or a sequence located 5′ of exon 5 and/or to a sequence comprised by exon 2 from NRG1, or a sequence located 3′ of exon 2;
the probe, primer or primer pair for detection of the fusion of transcript version 6 of SLC3A2 with NRG1 specifically hybridizes to, or has 95% or more complementary sequence identity with, a sequence comprised by exon 1 from said SLC3A2 or a sequence located 5′ of exon 1 and/or to a sequence comprised by exon 5 from NRG1, or a sequence located 3′ of exon 5;
the probe, primer or primer pair for detection of the fusion of VTCN1 with NRG1 specifically hybridizes to, or has 95% or more complementary sequence identity with, a sequence comprised by exon 2 from VTCN1, or a sequence located 5′ of exon 2 and/or to a sequence comprised by exon 2 from NRG1, or a sequence located 3′ of exon 2;
the probe, primer or primer pair for detection of the fusion of CDH1 with NRG1 specifically hybridizes to, or has 95% or more complementary sequence identity with, a sequence comprised by exon 11 from CDH1, or a sequence located 5′ of exon 11 and/or to a sequence comprised by exon 2 from NRG1, or a sequence located 3′ of exon 2;
the probe, primer or primer pair for detection of the fusion of CXADR with NRG1 specifically hybridizes to, or has 95% or more complementary sequence identity with, a sequence comprised by exon 1 from CXADR, or a sequence located 5′ of exon 1 and/or to a sequence comprised by exon 2 from NRG1, or a sequence located 3′ of exon 2;
the probe, primer or primer pair for detection of the fusion of GTF2E2 with NRG1 specifically hybridizes to, or has 95% or more complementary sequence identity with, a sequence comprised by exon 2 from GTF2E2, or a sequence located 5′ of exon 2 and/or to a sequence comprised by exon 2 from NRG1, or a sequence located 3′ of exon 2;
the probe, primer or primer pair for detection of the fusion of CSMD1 with NRG1 specifically hybridizes to, or has 95% or more complementary sequence identity with, a sequence comprised by exon 23 from CSMD1, or a sequence located 5′ of exon 23 and/or to a sequence comprised by exon 6 from NRG1, or a sequence located 3′ of exon 6;
the probe, primer or primer pair for detection of the fusion of PTN with NRG1 specifically hybridizes to, or has 95% or more complementary sequence identity with, a sequence comprised by exon 4 from PTN, or a sequence located 5′ of exon 4 and/or to a sequence comprised by exon 2 from NRG1, or a sequence located 3′ of exon 2;
the probe, primer or primer pair for detection of the fusion of ST14 with NRG1 specifically hybridizes to, or has 95% or more complementary sequence identity with, a sequence comprised by exon 11 from ST14, or a sequence located 5′ of exon 11 and/or to a sequence comprised by exon 6 from NRG1, or a sequence located 3′ of exon 6;
the probe, primer or primer pair for detection of the fusion of THBS1 with NRG1 specifically hybridizes to, or has 95% or more complementary sequence identity with, a sequence comprised by exon 9 from THBS1, or a sequence located 5′ of exon 9 and/or to a sequence comprised by exon 6 from NRG1, or a sequence located 3′ of exon 6;
the probe, primer or primer pair for detection of the fusion of AGRN with NRG1 specifically hybridizes to, or has 95% or more complementary sequence identity with, a sequence comprised by exon 12 from AGRN, or a sequence located 5′ of exon 12 and/or to a sequence comprised by exon 6 from NRG1, or a sequence located 3′ of exon 6;
the probe, primer or primer pair for detection of the fusion of PVALB with NRG1 specifically hybridizes to, or has 95% or more complementary sequence identity with, a sequence comprised by exon 4 from PVALB, or a sequence located 5′ of exon 4 and/or to a sequence comprised by exon 6 from NRG1, or a sequence located 3′ of exon 6;
the probe, primer or primer pair for detection of the fusion of transcript version 3 of SLC3A2 with NRG1 specifically hybridizes to, or has 95% or more complementary sequence identity with, a sequence comprised by exon 2 from said SLC3A2, or a sequence located 5′ of exon 2 and/or to a sequence comprised by exon 6 from NRG1, or a sequence located 3′ of exon 6;
the probe, primer or primer pair for detection of the fusion of APP with NRG1 specifically hybridizes to, or has 95% or more complementary sequence identity with, a sequence comprised by exon 14 from APP, or a sequence located 5′ of exon 14 and/or to a sequence comprised by exon 6 from NRG1, or a sequence located 3′ of exon 6;
the probe, primer or primer pair for detection of the fusion of WRN with NRG1 specifically hybridizes to, or has 95% or more complementary sequence identity with, a sequence comprised by exon 33 from WRN, or a sequence located 5′ of exon 33 and/or to a sequence comprised by exon 6 from NRG1, or a sequence located 3′ of exon 6;
the probe, primer or primer pair for detection of the fusion of DAAM1 with NRG1 specifically hybridizes to, or has 95% or more complementary sequence identity with, a sequence comprised by exon 1 from DAAM1, or a sequence located 5′ of exon 1 and/or to a sequence comprised by exon 1 from NRG1, or a sequence located 3′ of exon 1;
the probe, primer or primer pair for detection of the fusion of ASPH with NRG1 specifically hybridizes to, or has 95% or more complementary sequence identity with, a sequence comprised by exon 22 from ASPH, or a sequence located 5′ of exon 22 and/or to a sequence comprised by exon 2 from NRG1, or a sequence located 3′ of exon 2;
the probe, primer or primer pair for detection of the fusion of NOTCH2 with NRG1 specifically hybridizes to, or has 95% or more complementary sequence identity with, a sequence comprised by exon 6 from NOTCH2, or a sequence located 5′ of exon 6 and/or to a sequence comprised by exon 6 from NRG1, or a sequence located 3′ of exon 6;
the probe, primer or primer pair for detection of the fusion of CD74 with NRG1 specifically hybridizes to, or has 95% or more complementary sequence identity with, a sequence comprised by exon 2 from CD74, or a sequence located 5′ of exon 2 and/or to a sequence comprised by exon 2 from NRG1, or a sequence located 3′ of exon 2;
the probe, primer or primer pair for detection of the fusion of SDC4 with NRG1 specifically hybridizes to, or has 95% or more complementary sequence identity with, a sequence comprised by exon 2 from SDC4, or a sequence located 5′ of exon 2 and/or to a sequence comprised by exon 2 from NRG1, or a sequence located 3′ of exon 2;
the probe, primer or primer pair for detection of the fusion of CD44 with NRG1 specifically hybridizes to, or has 95% or more complementary sequence identity with, a sequence comprised by exon 5 from CD44, or a sequence located 5′ of exon 5 and/or to a sequence comprised by exon 6 from NRG1, or a sequence located 3′ of exon 6;
the probe, primer or primer pair for detection of the fusion of SLC4A4 with NRG1 specifically hybridizes to, or has 95% or more complementary sequence identity with, a sequence comprised by exon 14 from SLC4A4, or a sequence located 5′ of exon 14 and/or to a sequence comprised by exon 6 from NRG1, or a sequence located 3′ of exon 6;
the probe, primer or primer pair for detection of the fusion of SDC4 with NRG1 specifically hybridizes to, or has 95% or more complementary sequence identity with, a sequence comprised by exon 4 from SDC4, or a sequence located 5′ of exon 4 and/or to a sequence comprised by exon 2 from NRG1, or a sequence located 3′ of exon 2;
the probe, primer or primer pair for detection of the fusion of ZFAT with NRG1 specifically hybridizes to, or has 95% or more complementary sequence identity with, a sequence comprised by exon 12 from ZFAT, or a sequence located 5′ of exon 12 and/or to a sequence comprised by exon 6 from NRG1, or a sequence located 3′ of exon 6; or
the probe, primer or primer pair for detection of the fusion of DSCAML1 with NRG1 specifically hybridizes to, or has 95% or more complementary sequence identity with, a sequence comprised by exon 3 from DSCAML1, or a sequence located 5′ of exon 3 and/or to a sequence comprised by exon 2 from NRG1, or a sequence located 3′ of exon 2.

28. The nucleic acid probe, primer or primer pair of claim 27, wherein:
exon 1 from VAPB comprises or consists of SEQ ID NO: 17 or an allelic variant thereof;
exon 7 from CADM1 comprises or consists of SEQ ID NO: 39 or an allelic variant thereof;
exon 5 from CD44 comprises or consists of SEQ ID NO: 65 or an allelic variant thereof;
exon 1 from SLC3A2 comprises or consists of SEQ ID NO: 103 or an allelic variant thereof;
exon 2 from VTCN1 comprises or consists of SEQ ID NO: 169 or an allelic variant thereof;
exon 11 from CDH1 comprises or consists of SEQ ID NO: 198 or an allelic variant thereof;
exon 1 from CXADR comprises or consists of SEQ ID NO: 219 or an allelic variant thereof;
exon 2 from GTF2E2 comprises or consists of SEQ ID NO: 236 or an allelic variant thereof;
exon 23 from CSMD1 comprises or consists of SEQ ID NO: 279 or an allelic variant thereof;
exon 4 from PTN comprises or consists of SEQ ID NO: 318 or an allelic variant thereof;
exon 11 from ST14 comprises or consists of SEQ ID NO: 342 or an allelic variant thereof;
exon 9 from THBS1 comprises or consists of SEQ ID NO: 386 or an allelic variant thereof;
exon 12 from AGRN comprises or consists of SEQ ID NO: 416 or an allelic variant thereof;
exon 4 from PVALB comprises or consists of SEQ ID NO: 442 or an allelic variant thereof;
exon 2 from SLC3A2 comprises or consists of SEQ ID NO: 457 or an allelic variant thereof;
exon 14 from APP comprises or consists of SEQ ID NO: 501 or an allelic variant thereof;
exon 33 from WRN comprises or consists of SEQ ID NO: 562 or an allelic variant thereof;
exon 1 from DAAM1 comprises or consists of SEQ ID NO: 606 or an allelic variant thereof;
exon 22 from ASPH comprises or consists of SEQ ID NO: 658 or an allelic variant thereof;
exon 6 from NOTCH2 comprises or consists of SEQ ID NO: 700 or an allelic variant thereof;
exon 2 from CD74 comprises or consists of SEQ ID NO: 720 or an allelic variant thereof;
exon 2 from SDC4 comprises or consists of SEQ ID NO: 746 or an allelic variant thereof;
exon 5 from CD44 comprises or consists of SEQ ID NO: 65 or an allelic variant thereof;
exon 14 from SLC4A4 comprises or consists of SEQ ID NO: 780 or an allelic variant thereof;
exon 4 from SDC4 comprises or consists of SEQ ID NO: 748 or an allelic variant thereof;
exon 12 from ZFAT comprises or consists of SEQ ID NO: 841 or an allelic variant thereof;
exon 3 from DSCAML1 comprises or consists of SEQ ID NO: 872 or an allelic variant thereof; and
exons 1, 2, 5 and 6 from NRG1 comprise or consist of SEQ ID NO: 125, 126, 129 and 130, respectively, or an allelic variant thereof.

29. The nucleic acid probe, primer or primer pair of claim 27, wherein:
the probe, primer or primer pair for detection of the fusion of VAPB with NRG1 specifically hybridizes to, or has 95% or more complementary sequence identity with, a sequence comprised by SEQ ID NO: 17, or to an allelic variant thereof, and/or to a sequence comprised by SEQ ID NO: 153;
the probe, primer or primer pair for detection of the fusion of CADM1 with NRG1 specifically hybridizes to, or has 95% or more complementary sequence identity with, a sequence comprised by SEQ ID NO: 57 and/or to a sequence comprised by SEQ ID NO: 155;
the probe, primer or primer pair for detection of the fusion of CD44 with NRG1 specifically hybridizes to, or has 95% or more complementary sequence identity with, a sequence comprised by SEQ ID NO: 99 and/or to a sequence comprised by SEQ ID NO: 153;
the probe, primer or primer pair for detection of the fusion of SLC3A2 with NRG1 specifically hybridizes to, or has 95% or more complementary sequence identity with, a sequence comprised by SEQ ID NO: 103 and/or to a sequence comprised by SEQ ID NO: 157;
the probe, primer or primer pair for detection of the fusion of VTCN1 with NRG1 specifically hybridizes to, or has 95% or more complementary sequence identity with, a sequence comprised by SEQ ID NO: 181 and/or to a sequence comprised by SEQ ID NO: 153;
the probe, primer or primer pair for detection of the fusion of CDH1 with NRG1 specifically hybridizes to, or has 95% or more complementary sequence identity with, a sequence comprised by SEQ ID NO: 213 and/or to a sequence comprised by SEQ ID NO: 153;
the probe, primer or primer pair for detection of the fusion of CXADR with NRG1 specifically hybridizes to, or has 95% or more complementary sequence identity with, a sequence comprised by SEQ ID NO: 219 and/or to a sequence comprised by SEQ ID NO: 153;
the probe, primer or primer pair for detection of the fusion of GTF2E2 with NRG1 specifically hybridizes to, or has 95% or more complementary sequence identity with, a sequence comprised by SEQ ID NO: 252 and/or to a sequence comprised by SEQ ID NO: 153;
the probe, primer or primer pair for detection of the fusion of CSMD1 with NRG1 specifically hybridizes to, or has 95% or more complementary sequence identity with, a sequence comprised by SEQ ID NO: 309 and/or to a sequence comprised by SEQ ID NO: 155;
the probe, primer or primer pair for detection of the fusion of PTN with NRG1 specifically hybridizes to, or has 95% or more complementary sequence identity with, a sequence comprised by SEQ ID NO: 326 and/or to a sequence comprised by SEQ ID NO: 153;
the probe, primer or primer pair for detection of the fusion of ST14 with NRG1 specifically hybridizes to, or has 95% or more complementary sequence identity with, a sequence comprised by SEQ ID NO: 372 and/or to a sequence comprised by SEQ ID NO: 155;
the probe, primer or primer pair for detection of the fusion of THBS1 with NRG1 specifically hybridizes to, or has 95% or more complementary sequence identity with, a sequence comprised by SEQ ID NO: 399 and/or to a sequence comprised by SEQ ID NO: 155;
the probe, primer or primer pair for detection of the fusion of AGRN with NRG1 specifically hybridizes to, or has 95% or more complementary sequence identity with, a sequence comprised by SEQ ID NO: 433 and/or to a sequence comprised by SEQ ID NO: 155;
the probe, primer or primer pair for detection of the fusion of PVALB with NRG1 specifically hybridizes to, or has 95% or more complementary sequence identity with, a sequence comprised by SEQ ID NO: 450 and/or to a sequence comprised by SEQ ID NO: 155;
the probe, primer or primer pair for detection of the fusion of SLC3A2 with NRG1 specifically hybridizes to, or has 95% or more complementary sequence identity with, a sequence comprised by SEQ ID NO: 482 and/or to a sequence comprised by SEQ ID NO: 155;
the probe, primer or primer pair for detection of the fusion of APP with NRG1 specifically hybridizes to, or has 95% or more complementary sequence identity with, a sequence comprised by SEQ ID NO: 524 and/or to a sequence comprised by SEQ ID NO: 155;
the probe, primer or primer pair for detection of the fusion of WRN with NRG1 specifically hybridizes to, or has 95% or more complementary sequence identity with, a sequence comprised by SEQ ID NO: 601 and/or to a sequence comprised by SEQ ID NO: 155;
the probe, primer or primer pair for detection of the fusion of DAAM1 with NRG1 specifically hybridizes to, or has 95% or more complementary sequence identity with, a sequence comprised by SEQ ID NO: 606 and/or to a sequence comprised by SEQ ID NO: 138;
the probe, primer or primer pair for detection of the fusion of ASPH with NRG1 specifically hybridizes to, or has 95% or more complementary sequence identity with, a sequence comprised by SEQ ID NO: 689 and/or to a sequence comprised by SEQ ID NO: 153;
the probe, primer or primer pair for detection of the fusion of NOTCH2 with NRG1 specifically hybridizes to, or has 95% or more complementary sequence identity with, a sequence comprised by SEQ ID NO: 713 and/or to a sequence comprised by SEQ ID NO: 155;
the probe, primer or primer pair for detection of the fusion of CD74 with NRG1 specifically hybridizes to, or has 95% or more complementary sequence identity with, a sequence comprised by SEQ ID NO: 739 and/or to a sequence comprised by SEQ ID NO: 153;
the probe, primer or primer pair for detection of the fusion of SDC4 with NRG1 specifically hybridizes to, or has 95% or more complementary sequence identity with, a sequence comprised by SEQ ID NO: 757 and/or to a sequence comprised by SEQ ID NO: 153;
the probe, primer or primer pair for detection of the fusion of CD44 with NRG1 specifically hybridizes to, or has 95% or more complementary sequence identity with, a sequence comprised by SEQ ID NO: 99 and/or to a sequence comprised by SEQ ID NO: 155;
the probe, primer or primer pair for detection of the fusion of SLC4A4 with NRG1 specifically hybridizes to, or has 95% or more complementary sequence identity with, a sequence comprised by SEQ ID NO: 820 and/or to a sequence comprised by SEQ ID NO: 155;
the probe, primer or primer pair for detection of the fusion of SDC4 with NRG1 specifically hybridizes to, or has 95% or more complementary sequence identity with, a sequence comprised by SEQ ID NO: 940 and/or to a sequence comprised by SEQ ID NO: 153;
the probe, primer or primer pair for detection of the fusion of ZFAT with NRG1 specifically hybridizes to, or has 95% or more complementary sequence identity with, a sequence comprised by SEQ ID NO: 864 and/or to a sequence comprised by SEQ ID NO: 155; and
the probe, primer or primer pair for detection of the fusion of DSCAML1 with NRG1 specifically hybridizes to, or has 95% or more complementary sequence identity with, a sequence comprised by SEQ ID NO: 938 and/or to a sequence comprised by SEQ ID NO: 153.

30. A first and a second nucleic acid probe for use in an in-situ hybridization assay to detect a polynucleotide fusion of any one of claims 1-17,
wherein the first probe specifically hybridizes to a VAPB sequence which is located 5′ from the nucleic acid of position 43 of SEQ ID NO: 3, and the second probe specifically hybridizes to a NRG1 sequence which is located 3′ from the nucleic acid of position 44 of SEQ ID NO: 3;
wherein the first probe specifically hybridizes to a CADM1 sequence which is located 5′ from the nucleic acid of position 53 of SEQ ID NO: 7, and the second probe specifically hybridizes to a NRG1 sequence which is located 3′ from the nucleic acid of position 54 of SEQ ID NO: 7;
wherein the first probe specifically hybridizes to a CD44 sequence which is located 5′ from the nucleic acid of position 52 of SEQ ID NO: 11, and the second probe specifically hybridizes to a NRG1 sequence which is located 3′ from the nucleic acid of position 53 of SEQ ID NO: 11;
wherein the first probe specifically hybridizes to a SLC3A2 sequence which is located 5′ from the nucleic acid of position 53 of SEQ ID NO: 15, and the second probe specifically hybridizes to a NRG1 sequence which is located 3′ from the nucleic acid of position 54 of SEQ ID NO: 15;
wherein the first probe specifically hybridizes to a VTCN1 sequence which is located 5′ from the nucleic acid of position 65 of SEQ ID NO: 166, and the second probe specifically hybridizes to a NRG1 sequence which is located 3′ from the nucleic acid of position 66 of SEQ ID NO: 166;
wherein the first probe specifically hybridizes to a CDH1 sequence which is located 5′ from the nucleic acid of position 119 of SEQ ID NO: 186, and the second probe specifically hybridizes to a NRG1 sequence which is located 3′ from the nucleic acid of position 120 of SEQ ID NO: 186;
wherein the first probe specifically hybridizes to a CXADR sequence which is located 5′ from the nucleic acid of position 43 of SEQ ID NO: 217, and the second probe specifically hybridizes to a NRG1 sequence which is located 3′ from the nucleic acid of position 44 of SEQ ID NO: 217;
wherein the first probe specifically hybridizes to a GTF2E2 sequence which is located 5′ from the nucleic acid of position 141 of SEQ ID NO: 233, and the second probe specifically hybridizes to a NRG1 sequence which is located 3′ from the nucleic acid of position 142 of SEQ ID NO: 233;
wherein the first probe specifically hybridizes to a CSMD1 sequence which is located 5′ from the nucleic acid of position 88 of SEQ ID NO: 255, and the second probe specifically hybridizes to a NRG1 sequence which is located 3′ from the nucleic acid of position 89 of SEQ ID NO: 255;
wherein the first probe specifically hybridizes to a PTN sequence which is located 5′ from the nucleic acid of position 102 of SEQ ID NO: 313, and the second probe specifically hybridizes to a NRG1 sequence which is located 3′ from the nucleic acid of position 103 of SEQ ID NO: 313;
wherein the first probe specifically hybridizes to a ST14 sequence which is located 5′ from the nucleic acid of position 95 of SEQ ID NO: 330, and the second probe specifically hybridizes to a NRG1 sequence which is located 3′ from the nucleic acid of position 96 of SEQ ID NO: 330;
wherein the first probe specifically hybridizes to a THBS1 sequence which is located 5′ from the nucleic acid of position 56 of SEQ ID NO: 376, and the second probe specifically hybridizes to a NRG1 sequence which is located 3′ from the nucleic acid of position 57 of SEQ ID NO: 376;
wherein the first probe specifically hybridizes to a AGRN sequence which is located 5′ from the nucleic acid of position 106 of SEQ ID NO: 403, and the second probe specifically hybridizes to a NRG1 sequence which is located 3′ from the nucleic acid of position 107 of SEQ ID NO: 403;
wherein the first probe specifically hybridizes to a PVALB sequence which is located 5′ from the nucleic acid of position 102 of SEQ ID NO: 437, and the second probe specifically hybridizes to a NRG1 sequence which is located 3′ from the nucleic acid of position 103 of SEQ ID NO: 437;
wherein the first probe specifically hybridizes to a SLC3A2 sequence which is located 5′ from the nucleic acid of position 93 of SEQ ID NO: 454, and the second probe specifically hybridizes to a NRG1 sequence which is located 3′ from the nucleic acid of position 94 of SEQ ID NO: 454;
wherein the first probe specifically hybridizes to a APP sequence which is located 5′ from the nucleic acid of position 54 of SEQ ID NO: 486, and the second probe specifically hybridizes to a NRG1 sequence which is located 3′ from the nucleic acid of position 55 of SEQ ID NO: 486;
wherein the first probe specifically hybridizes to a WRN sequence which is located 5′ from the nucleic acid of position 96 of SEQ ID NO: 528, and the second probe specifically hybridizes to a NRG1 sequence which is located 3′ from the nucleic acid of position 97 of SEQ ID NO: 528;
wherein the first probe specifically hybridizes to a DAAM1 sequence which is located 5′ from the nucleic acid of position 75 of SEQ ID NO: 605, and the second probe specifically hybridizes to a NRG1 sequence which is located 3′ from the nucleic acid of position 76 of SEQ ID NO: 605;
wherein the first probe specifically hybridizes to a ASPH sequence which is located 5′ from the nucleic acid of position 75 of SEQ ID NO: 635, and the second probe specifically hybridizes to a NRG1 sequence which is located 3′ from the nucleic acid of position 76 of SEQ ID NO: 635;
wherein the first probe specifically hybridizes to a NOTCH2 sequence which is located 5′ from the nucleic acid of position 75 of SEQ ID NO: 693, and the second probe specifically hybridizes to a NRG1 sequence which is located 3′ from the nucleic acid of position 76 of SEQ ID NO: 693;
wherein the first probe specifically hybridizes to a CD74 sequence which is located 5′ from the nucleic acid of position 75 of SEQ ID NO: 717, and the second probe specifically hybridizes to a NRG1 sequence which is located 3′ from the nucleic acid of position 76 of SEQ ID NO: 717;
wherein the first probe specifically hybridizes to a SDC4 sequence which is located 5′ from the nucleic acid of position 75 of SEQ ID NO: 743, and the second probe specifically hybridizes to a NRG1 sequence which is located 3′ from the nucleic acid of position 76 of SEQ ID NO: 743;
wherein the first probe specifically hybridizes to a CD44 sequence which is located 5′ from the nucleic acid of position 75 of SEQ ID NO: 761, and the second probe specifically hybridizes to a NRG1 sequence which is located 3′ from the nucleic acid of position 76 of SEQ ID NO: 761;
wherein the first probe specifically hybridizes to a SLC4A4 sequence which is located 5′ from the nucleic acid of position 75 of SEQ ID NO: 765, and the second probe specifically hybridizes to a NRG1 sequence which is located 3′ from the nucleic acid of position 76 of SEQ ID NO: 765;
wherein the first probe specifically hybridizes to a SDC4 sequence which is located 5′ from the nucleic acid of position 75 of SEQ ID NO: 824, and the second probe specifically hybridizes to a NRG1 sequence which is located 3′ from the nucleic acid of position 76 of SEQ ID NO: 824;
wherein the first probe specifically hybridizes to a ZFAT sequence which is located 5′ from the nucleic acid of position 75 of SEQ ID NO: 828, and the second probe specifically hybridizes to a NRG1 sequence which is located 3′ from the nucleic acid of position 76 of SEQ ID NO: 828; or
wherein the first probe specifically hybridizes to a DSCAML1 sequence which is located 5′ from the nucleic acid of position 75 of SEQ ID NO: 868, and the second probe specifically hybridizes to a NRG1 sequence which is located 3′ from the nucleic acid of position 76 of SEQ ID NO: 868.

31. A first antibody or a set of a first and a second antibody pair for detection of a polypeptide encoded by a polynucleotide fusion according to any of the claims 1-17.

32. A detection assay comprising a first antibody or a set of a first and second antibodies for detection of the presence of a polypeptide encoded by a polynucleotide fusion according to any one of claims 1-17, wherein the first antibody or set of a first and second antibodies preferably is the first antibody or a set of a first and second antibodies of claim 31.

33. The first antibody or set of first and second antibodies of claim 31, or the detection assay according to claim 32, wherein the first antibody binds a polypeptide fusion selected from VAPB-NRG1, CADM1-NRG1, CD44-NRG1, SLC3A2-NRG1, VTCN1-NRG1, CDH1-NRG1, CXADR-NRG1, GTF2E2-NRG1, CSMD1-NRG1, PTN-NRG1, ST14-NRG1, THBS1-NRG1, AGRN-NRG1, PVALB-NRG1, APP-NRG1, WRN-NRG1, ASPH-NRG1, NOTCH2-NRG1, CD74-NRG1, SDC4-NRG1, SLC4A4-NRG1, ZFAT-NRG1 or DSCAML1-NRG1 and the set of first and second antibodies binds VAPB and NRG1 or CADM1 and NRG1, or CD44 and NRG1, SLC3A2 and NRG1, VTCN1 and NRG1, CDH1 and NRG1, CXADR and NRG1, GTF2E2 and NRG1, CSMD1 and NRG1, PTN and NRG1, ST14 and NRG1, THBS1 and NRG1, AGRN and NRG1, PVALB and NRG1, APP and NRG1, WRN and NRG1, ASPH and NRG1, NOTCH2 and NRG1, CD74 and NRG1, SDC4 and NRG1, SLC4A4 and NRG1, ZFAT and NRG1, or DSCAML1 and NRG1 respectively.

34. A method for identifying a polynucleotide fusion, or a polypeptide encoded therefrom, according to any one of the claims 1-17 in a sample, said method comprising testing a sample obtained from a subject to detect the presence of the fusion in the sample.

35. A method for detecting the presence of a polynucleotide fusion, or a polypeptide encoded therefrom, according to any one of the claims 1-17 in a sample, said method comprising testing a sample obtained from a subject to detect the presence of the fusion in the sample.

36. A method for establishing whether an aberrant cell from a subject comprises a polynucleotide fusion, or a polypeptide encoded therefrom, according to any one of claims 1-17, said method comprising testing the polynucleotide or polypeptide contents of the aberrant cell obtained from the subject for the presence of the fusion in the sample.

37. A method for identifying a subject as carrying a polynucleotide fusion, or a polypeptide encoded therefrom, according to any one of claims 1-17, said method comprising testing a sample obtained from a subject to detect the presence of the fusion in the sample.

38. The method of any one of claims 34-37, wherein the testing comprises detecting the fusion by utilizing a binding agent that specifically binds the polynucleotide, such as the nucleic acid probe, primer or primer pair of claim 24-29, or a polypeptide encoded therefrom, or utilizing a binding agent that binds a polynucleotide that comprises the polynucleotide fusion.

39. The method of any one of claims 34-38, wherein the testing comprises amplifying or detecting a sequence that discriminates between the presence and absence of the polynucleotide fusion, or polypeptide encoded therefrom.

40. The method of any one of claims 34-39, wherein the polynucleotide fusion is obtained from an aberrant cell expressing a polynucleotide fusion that comprises an EGF-like domain of NRG1.

41. The method of any one of claims 34-40, wherein the method comprises a step of obtaining the sample from a subject, followed by a step of isolating the polynucleotide or polypeptide encoded therefrom, from the sample.

42. The method of any one of claims 34-41, wherein the method comprises a step of purifying or isolating the polynucleotide or polypeptide from the sample.

43. The method of any one of claims 34-42, wherein the binding agent is or comprises a primer, a primer pair, a probe or an antibody.

44. The method of any one of claims 34-43, wherein the testing is an ex vivo method, preferably an in vitro method.

45. The method of any one of claims 34-44, wherein the binding agent comprises or is associated with a detectable label.

46. The method of any one of claims 34-45, wherein the sample is a liquid biopsy sample or a solid sample, such as a formalin fixed paraffin embedded tissue (FFPE) sample.

47. The method of any one of claims 34-46, wherein the sample comprises blood, serum, plasma, pleural liquid, urine, semen, amniotic fluid or peritoneal fluid.

48. The method of any one of claims 34-47, wherein the sample comprises an aberrant cell, such as a tumor cell or a cancer cell, or the polynucleotide or polypeptide contents thereof.

49. A method of treating a subject having an ErbB-2 and/or ErbB-3 positive cancer or tumor comprising a polynucleotide fusion and/or expressing a fusion polypeptide encoded therefrom, said method comprising administering to the subject an effective amount of an ErbB-2 and/or ErbB-3 targeting agent, wherein the fusion is a fusion according to any one of claims 1-17.

50. A method for inhibiting the progression in a subject of an ErbB-2 and ErbB-3 positive cancer or tumor comprising a polynucleotide fusion and/or expressing a fusion polypeptide encoded therefrom, said method comprising administering to the subject an effective amount of an ErbB-2 and/or ErbB-3 targeting agent, wherein said fusion is a fusion according to any one of claims 1-17.

51. An ErbB-2 and/or ErbB-3 targeting agent for use in the treatment of a subject that has an ErbB-2 and ErbB-3 positive cancer or tumor comprising a polynucleotide fusion and/or expressing a fusion polypeptide encoded therefrom, said treatment comprising administering an effective amount of the ErbB-2 and/or ErbB-3 targeting agent to the subject, wherein said fusion is a fusion according to any one of claims 1-17.

52. A method for diagnosing a subject for an aberrant cell that comprises a polynucleotide fusion according to any one of claims 1-17, or polypeptide encoded therefrom, the method comprising testing a sample obtained from a subject to detect the presence of the fusion in the sample.

53. The method of claim 52, wherein the testing comprises detecting the fusion by utilizing a binding agent that specifically binds the polynucleotide, such as the nucleic acid probe, primer or primer pair of any one of claims 24-29, or a polypeptide encoded therefrom, or utilizing a binding agent that binds a polynucleotide that comprises the polynucleotide fusion.

54. A method for assessing whether a subject suffers from a cancer or tumor or is prone to suffering from a cancer or tumor, the method comprising testing a sample obtained from a subject to detect the presence of a polynucleotide fusion according to any one of claims 1-17, or polypeptide encoded therefrom, in the sample, and assessing that said subject suffers from said cancer or tumor or is prone to suffering from said cancer or tumor, by identifying the presence of said polynucleotide or polypeptide fusion.

55. The method or use according to any one of claims 49-51, wherein the ErbB-2 and/or ErbB-3 targeting agent is selected from the group consisting of a multispecific antibody comprising a first antigen-binding site that binds an extracellular part of ErbB-2 and a second antigen-binding site that binds an extracellular part of ErbB-3, a tyrosine kinase inhibitor of ErbB-2, a monospecific bivalent antibody comprising an antigen-binding site that bind an extracellular part of ErbB-2, a monospecific bivalent antibody comprising an antigen-binding site that bind an extracellular part of ErbB-3, or any combination thereof.

56. The method or use according to any one of claim 49-51, or 55, wherein the ErbB-2 and/or ErbB-3 targeting agent is zenocutuzumab.

57. The method or use according to any one of claims 35-56, wherein the aberrant cell, cancer cell, tumor cell or sample comprises the polynucleotide fusion of claims 1-17, or a polypeptide encoded thereby, and wherein the polynucleotide fusion comprised by the cell or sample further comprises an in frame fusion of a coding sequence that codes for EGF-like domain of NRG1.

58. The method or use according to any one of claims 35-57, wherein the aberrant cell is from a cancer, in particular said cancer is an adenocarcinoma, more in particular a mucinous adenocarcinoma, a pancreatic cancer, in particular a pancreatic adenocarcinoma, more in particular a pancreatic ductal adenocarcinoma, a renal cell carcinoma, a sarcoma, a bladder, a colon, a rectal, colorectal, a gallbladder, a head and neck cancer, a prostrate, a uterus, a breast cancer, an ovarian cancer, a liver cancer, an endometrial cancer, a lung cancer, preferably a non-small cell lung cancer, preferably, more preferably invasive mucinous adenocarcinoma, or a primary or metastatic cancer.

59. An in vivo animal model comprising a polynucleotide fusion according to any one of claims 1-17 and/or expressing a polypeptide fusion encoded therefrom, wherein preferably the polynucleotide fusion or polypeptide fusion comprised by the animal model is comprised by an engrafted aberrant cell present in the animal model or comprised by the genome of the animal model.

60. A method of treatment of the in vivo animal model of claim 59 with an Erb2 and/or Erb3 targeting agent selected from the group consisting of a multispecific antibody comprising a first antigen-binding site that binds an extracellular part of ErbB-2 and a second antigen-binding site that binds an extracellular part of ErbB-3, a tyrosine kinase inhibitor of ErbB-2, a monospecific bivalent antibody comprising an antigen-binding site that bind an extracellular part of ErbB-2, a monospecific bivalent antibody comprising an antigen-binding site that bind an extracellular part of ErbB-3, or any combination thereof, said method comprising administering to the animal said Erb2 and/or Erb3 targeting agent.

61. A first and a second nucleic acid probe for use in an in-situ hybridization assay to detect a genetic rearrangement of VAPB, CADM1, CD44, SLC3A2, VTCN1, CDH1, CXADR, GTF2E2, CSMD1, PTN, ST14, THBS1, AGRN, PVALB, APP, WRN, DAAM1, ASPH, NOTCH2, CD74, SDC4, SLC4A4, ZFAT or DSCAML1 wherein:
the first probe for detection of a genetic rearrangement of VAPB specifically hybridizes to a VAPB sequence which is 5′ from the nucleic acid of position 43 of SEQ ID NO: 1, and the second probe specifically hybridizes to a VAPB sequence which is 3′ from the nucleic acid of position 43 of SEQ ID NO: 1;
the first probe for detection of a genetic rearrangement of CADM1 specifically hybridizes to a CADM1 sequence which is 5′ from the nucleic acid of position 53 of SEQ ID NO: 5, and the second probe specifically hybridizes to a CADM1 sequence which is 3′ from the nucleic acid of position 53 of SEQ ID NO: 5;
the first probe for detection of a genetic rearrangement of CD44 specifically hybridizes to a CD44 sequence which is 5′ from the nucleic acid of position 52 of SEQ ID NO: 9, and the second probe specifically hybridizes to a CD44 sequence which is 3′ from the nucleic acid of position 52 of SEQ ID NO: 9;
the first probe for detection of a genetic rearrangement of SLC3A2 specifically hybridizes to a SLC3A2 sequence which is 5′ from the nucleic acid of position 53 of SEQ ID NO: 13, and the second probe specifically hybridizes to a SLC3A2 sequence which is 3′ from the nucleic acid of position 53 of SEQ ID NO: 13;
the first probe for detection of a genetic rearrangement of VTCN1 specifically hybridizes to a VTCN1 sequence which is 5′ from the nucleic acid of position 65 of SEQ ID NO: 164, and the second probe specifically hybridizes to a VTCN1 sequence which is 3′ from the nucleic acid of position 65 of SEQ ID NO: 164;
the first probe for detection of a genetic rearrangement of CDH1 specifically hybridizes to a CDH1 sequence which is 5′ from the nucleic acid of position 119 of SEQ ID NO: 184, and the second probe specifically hybridizes to a CDH1 sequence which is 3′ from the nucleic acid of position 119 of SEQ ID NO: 184;
the first probe for detection of a genetic rearrangement of CXADR specifically hybridizes to a CXADR sequence which is 5′ from the nucleic acid of position 43 of SEQ ID NO: 215, and the second probe specifically hybridizes to a CXADR sequence which is 3′ from the nucleic acid of position 43 of SEQ ID NO: 215;
the first probe for detection of a genetic rearrangement of GTF2E2 specifically hybridizes to a GTF2E2 sequence which is 5′ from the nucleic acid of position 141 of SEQ ID NO: 231, and the second probe specifically hybridizes to a GTF2E2 sequence which is 3′ from the nucleic acid of position 141 of SEQ ID NO: 231;
the first probe for detection of a genetic rearrangement of CSMD1 specifically hybridizes to a CSMD1 sequence which is 5′ from the nucleic acid of position 88 of SEQ ID NO: 253, and the second probe specifically hybridizes to a CSMD1 sequence which is 3′ from the nucleic acid of position 88 of SEQ ID NO:253;
the first probe for detection of a genetic rearrangement of PTN specifically hybridizes to a PTN sequence which is 5′ from the nucleic acid of position 102 of SEQ ID NO: 311, and the second probe specifically hybridizes to a PTN sequence which is 3′ from the nucleic acid of position 102 of SEQ ID NO: 311;
the first probe for detection of a genetic rearrangement of ST14 specifically hybridizes to a ST14 sequence which is 5′ from the nucleic acid of position 95 of SEQ ID NO: 328, and the second probe specifically hybridizes to a ST14 sequence which is 3′ from the nucleic acid of position 95 of SEQ ID NO: 328;
the first probe for detection of a genetic rearrangement of AGRN specifically hybridizes to a AGRN sequence which is 5′ from the nucleic acid of position 106 of SEQ ID NO: 401, and the second probe specifically hybridizes to a AGRN sequence which is 3′ from the nucleic acid of position 106 of SEQ ID NO: 401;
the first probe for detection of a genetic rearrangement of THBS1 specifically hybridizes to a THBS1 sequence which is 5′ from the nucleic acid of position 56 of SEQ ID NO: 374, and the second probe specifically hybridizes to a THBS1 sequence which is 3′ from the nucleic acid of position 56 of SEQ ID NO: 374;
the first probe for detection of a genetic rearrangement of PVALB specifically hybridizes to a PVALB sequence which is 5′ from the nucleic acid of position 102 of SEQ ID NO: 435, and the second probe specifically hybridizes to a PVALB sequence which is 3′ from the nucleic acid of position 102 of SEQ ID NO: 435;
the first probe for detection of a genetic rearrangement of SLC3A2 specifically hybridizes to a SLC3A2 sequence which is 5′ from the nucleic acid of position 93 of SEQ ID NO: 452, and the second probe specifically hybridizes to a SLC3A2 sequence which is 3′ from the nucleic acid of position 93 of SEQ ID NO: 452;
the first probe for detection of a genetic rearrangement of APP specifically hybridizes to a APP sequence which is 5′ from the nucleic acid of position 54 of SEQ ID NO: 484, and the second probe specifically hybridizes to a APP sequence which is 3′ from the nucleic acid of position 54 of SEQ ID NO: 484;
the first probe for detection of a genetic rearrangement of WRN specifically hybridizes to a WRN sequence which is 5′ from the nucleic acid of position 96 of SEQ ID NO: 526, and the second probe specifically hybridizes to a WRN sequence which is 3′ from the nucleic acid of position 96 of SEQ ID NO: 526;
the first probe for detection of a genetic rearrangement of DAAM1 specifically hybridizes to a DAAM1 sequence which is 5′ from the nucleic acid of position 75 of SEQ ID NO: 603, and the second probe specifically hybridizes to a DAAM1 sequence which is 3′ from the nucleic acid of position 75 of SEQ ID NO: 603;
the first probe for detection of a genetic rearrangement of ASPH specifically hybridizes to a ASPH sequence which is 5′ from the nucleic acid of position 75 of SEQ ID NO: 633, and the second probe specifically hybridizes to a ASPH sequence which is 3′ from the nucleic acid of position 75 of SEQ ID NO: 633;
the first probe for detection of a genetic rearrangement of NOTCH2 specifically hybridizes to a NOTCH2 sequence which is 5′ from the nucleic acid of position 75 of SEQ ID NO: 691, and the second probe specifically hybridizes to a NOTCH2 sequence which is 3′ from the nucleic acid of position 75 of SEQ ID NO: 691;
the first probe for detection of a genetic rearrangement of CD74 specifically hybridizes to a CD74 sequence which is 5′ from the nucleic acid of position 75 of SEQ ID NO: 715, and the second probe specifically hybridizes to a CD74 sequence which is 3′ from the nucleic acid of position 75 of SEQ ID NO: 715;
the first probe for detection of a genetic rearrangement of SDC4 specifically hybridizes to a SDC4 sequence which is 5′ from the nucleic acid of position 75 of SEQ ID NO: 741, and the second probe specifically hybridizes to a SDC4 sequence which is 3′ from the nucleic acid of position 75 of SEQ ID NO: 741;
the first probe for detection of a genetic rearrangement of CD44 specifically hybridizes to a CD44 sequence which is 5′ from the nucleic acid of position 75 of SEQ ID NO: 759, and the second probe specifically hybridizes to a CD44 sequence which is 3′ from the nucleic acid of position 75 of SEQ ID NO: 759;
the first probe for detection of a genetic rearrangement of SLC4A4 specifically hybridizes to a SLC4A4 sequence which is 5′ from the nucleic acid of position 75 of SEQ ID NO: 763, and the second probe specifically hybridizes to a SLC4A4 sequence which is 3′ from the nucleic acid of position 75 of SEQ ID NO: 763;
the first probe for detection of a genetic rearrangement of SDC4 specifically hybridizes to a SDC4 sequence which is 5′ from the nucleic acid of position 75 of SEQ ID NO: 822, and the second probe specifically hybridizes to a SDC4 sequence which is 3′ from the nucleic acid of position 75 of SEQ ID NO: 822;
the first probe for detection of a genetic rearrangement of ZFAT specifically hybridizes to a ZFAT sequence which is 5′ from the nucleic acid of position 75 of SEQ ID NO: 826, and the second probe specifically hybridizes to a ZFAT sequence which is 3′ from the nucleic acid of position 75 of SEQ ID NO: 826; or
the first probe for detection of a genetic rearrangement of DSCAML1 specifically hybridizes to a DSCAML1 sequence which is 5′ from the nucleic acid of position 75 of SEQ ID NO: 866, and the second probe specifically hybridizes to a DSCAML1 sequence which is 3′ from the nucleic acid of position 75 of SEQ ID NO: 866.
